(19) United States
(12) Patent Application Publication
(10) Pub. No.: US 2024/0181084 A1
(43) Pub. Date: Jun. 6, 2024

(54) Genome Editing by Directed Non-Homologous DNA Insertion Using a Retroviral Integrase-Cas Fusion Protein and Methods of Treatment

(71) Applicant: University of Rochester, Rochester, NY (US)

(72) Inventor: Douglas Matthew Anderson, Pittsford, NY (US)

(21) Appl. No.: 18/556,536

(22) PCT Filed: Apr. 22, 2022
(86) PCT No.: PCT/US22/25927

§ 371 Date: Oct. 20, 2023

Related U.S. Application Data
(60) Provisional application No. 63/178,862, filed on Apr. 23, 2021.

(51) Int. Cl. A61K 48/00; A61K 38/17; A61P 25/24; C12N 9/22; C12N 15/11

(52) U.S. Cl. CPC A61K 48/0058; A61K 38/1709; A61P 25/24; C12N 9/22; C12N 15/111; C12N 2310/20; C12N 2740/10033

(57) ABSTRACT

The present disclosure provides proteins, nucleic acids, systems and methods for editing genomic material and method of treatment.

### CROSS REFERENCE TO RELATED APPLICATIONS

[0001] This application claims priority to U.S. Provisional Application No. 63/178,862, filed Apr. 23, 2021, which is hereby incorporated by reference herein in its entirety.

### BACKGROUND OF THE INVENTION

[0002] CRISPR-Cas has significantly advanced our ability to rapidly alter mammalian genomes for basic research and clinical applications. CRISPR-Cas uses a guide-RNA to direct Cas to specific DNA target sequences, where it induces double-strand DNA cleavage and triggers cellular repair pathways to introduce frame-shift mutations or insert donor sequences through Homology Directed Repair (HDR). Despite these significant advances, the targeted delivery of large DNA sequences for genome editing using CRISPR-Cas mediated HDR remains inefficient, requires donor templates containing significant regions of flanking homology and induces the p53 DNA damage pathway (Byrne et al., 2015, NAR 43:e21; Happaniemi et al., 2018, Nat Med 24:927-30; Ihry et al., 2018, Nat Med 24:939-46). Together, these significantly limit the efficiency of CRISPR-Cas genome editing. Accordingly, there exists a need for improved integrated genome editing.

[0003] In contrast, the lentiviral enzyme Integrase (IN) is both necessary and sufficient to catalyze the insertion of large lentiviral genomes into host cellular DNA, through a process which does not require target sequence homology. IN-mediated insertion of lentiviral DNA occurs with little DNA target sequence specificity, due in part to its C-terminal domain which binds non-specifically to DNA (Lutzke & Plasterk 1998, J Virol 72:4841-48).

[0004] Current limitations with gene therapy technologies have prevented the treatment of most human monogenetic diseases. CRISPR-Cas gene editing has been a recent focus for the development of therapeutic approaches to correct deleterious mutations mammalian genomes. This remains a significant challenge due to the numerous patient-specific mutations within the human genome that can give rise to diseases and disorders. CRISPR guide-RNAs designed to target exon-intron boundaries can allow for exon-skipping strategies to target groups of these mutations, however, the efficacy of these strategies remain to be tested and are not applicable to all patients.

[0005] Transgenic expression of many genes can both prevent and reverse disease outcomes in animal models, however the large size of some genes greatly exceeds the size limit of traditional gene editing approaches, such as CRISPR-Cas or traditional viral gene therapy approaches, such as AAV (˜4.9 kb limit), preventing its use for human gene therapy. Approaches using smaller engineered genes delivered by AAV are currently in clinical trials, however it remains to be determined if these strategies offer long term restoration and are only applicable to patients with specific mutations.

[0006] In contrast, lentiviral vectors are capable of delivering large gene and allow for permanent correction by integrating into host genomes. However, the current random nature of lentiviral integration has the potential to cause off-target mutations and disease, which has prevented their use for clinical applications (Milone et al., 2018, Leukemia 23:1529-41). Lentiviral sequences are inserted into host genomes by the virus-encoded enzyme Integrase (IN), which utilizes a non-specific DNA binding domain required for genome integration (Andrake et al., 2015, Annu Rev Virol 2:241-64).

[0007] Accordingly, there exists a need for improved editing genomic material. The present invention meets this need.

### SUMMARY OF THE INVENTION

[0008] In one aspect, the present invention provides a method of treating Friedreich's Ataxia in a subject. In one embodiment, the method comprises administering to a subject a) a fusion protein comprising a retroviral integrase (IN) or a fragment thereof, a CRISPR-associated (Cas) protein, and a nuclear localization signal (NLS) or a nucleic acid molecule comprising one or more nucleic acid sequences encoding a retroviral integrase (IN) or a fragment thereof, a CRISPR-associated (Cas) protein, and a nuclear localization signal (NLS); b) a guide nucleic acid comprising a targeting nucleotide sequence complimentary to a target region in the genome of the subject; and c) a donor template nucleic acid comprising a U3 sequence, a U5 sequence and a donor template sequence, wherein the donor template sequence comprises a nucleic acid sequence encoding frataxin.

[0009] In one embodiment, the retroviral IN is selected from the group consisting of human immunodeficiency virus (HIV) IN, Rous sarcoma virus (RSV) IN, Mouse mammary tumor virus (MMTV) IN, Moloney murine leukemia virus (MoLV) IN, bovine leukemia virus (BLV) IN, Human T-lymphotropic virus (HTLV) IN, avian sarcoma leukosis virus (ASLV) IN, feline leukemia virus (FLV) IN, xenotropic murine leukemia virus-related virus (XMLV) IN, simian immunodeficiency virus (SIV) IN, feline immunodeficiency virus (FIV) IN, equine infectious anemia virus (EIAV) IN, Prototype foamy virus (PFV) IN, simian foamy virus (SFV) IN, human foamy virus (HFV) IN, walleye dermal sarcoma virus (WDSV) IN, and bovine immunodeficiency virus (BIV) IN. In one embodiment, the IN comprises a sequence at least 70% identical to one of SEQ ID NOs:9-48.

[0010] In one embodiment, the Cas protein is selected from the group consisting of Cas9, Cas14, and Cpf1. In one embodiment, the Cas protein comprises a sequence at least 70% identical to one of SEQ ID NOs:1-8. In one embodiment, the as protein is catalytically deficient (dCas). In one embodiment, the Cas protein comprises a sequence at least 70% identical to one of SEQ ID NOs:2, 4, 6, and 8.

[0011] In one embodiment, the NLS is a Ty1 or Ty2 NLS. In one embodiment, the NLS comprises a sequence at least 70% identical to one of SEQ ID NOs:53-54 and 361-973.

[0012] In one embodiment, the target region in the genome of the subject is a safe harbor site. In one embodiment, the donor template sequence encodes a protein at least 70% identical to SEQ ID NO:357. In one embodiment, the donor template sequence comprises a sequence at least 70% identical to SEQ ID NO:358. In one embodiment, the IN is HIV IN and the donor template sequence comprise a U3 sequence of SEQ ID NO:258, a U5 sequence of SEQ ID NO: 259, or both.

[0013] In one aspect, the present invention provides a fusion protein comprising: a) a CRISPR-associated (Cas) 14 protein; and b) a nuclear localization signal (NLS). In one embodiment, the Cas14 protein comprises a sequence at least 70% identical to one of SEQ ID NOs:7-8.

[0014] In one embodiment, the NLS is a Ty1 or Ty2 NLS. In one embodiment, the NLS comprises a sequence at least 70% identical to one of SEQ ID NOs:53-54 and 361-973.

[0015] In one embodiment, the fusion protein comprises a sequence at least 70% identical to SEQ ID NO:145.

[0016] In one embodiment, the fusion protein further comprises a retroviral integrase (IN) or a fragment thereof. In one embodiment, the IN comprises a sequence at least 70% identical to one of SEQ ID NOs:9-48.

[0017] In one embodiment, the Cas14 protein is catalytically deficient (dCas). In one embodiment, the fusion protein comprises a sequence at least 70% identical to one of SEQ ID NOs:63-102 and 146.

[0018] In one aspect, the present invention provides a nucleic acid molecule comprising a nucleic acid sequence encoding the fusion protein.

[0019] In one aspect, the present invention provides a method of editing genetic material, the method comprising administering to the genetic material: a fusion protein, as described herein, or a nucleic acid molecule encoding a fusion protein, as described herein; a guide nucleic acid comprising a targeting nucleotide sequence complimentary to a target region in the genetic material; and a donor template nucleic acid comprising a U3 sequence, a U5 sequence and a donor template sequence.

[0020] In one embodiment, the guide nucleic acid comprises a tracrRNA and as CRISPR RNA (crRNA). In one embodiment, the tracrRNA comprises a sequence at least 70% identical to one of SEQ ID NOs: 336-339.

[0021] In one aspect, the present invention provides a system for editing genetic material, comprising in one or more vectors: a) a nucleic acid sequence encoding a fusion protein comprising a CRISPR-associated (Cas) 14 protein, and a nuclear localization signal (NLS); b) nucleic acid sequence coding a CRISPR-Cas system guide RNA; and c) a nucleic acid sequence coding a donor template nucleic acid, wherein the donor template nucleic acid comprises a U3 sequence, a U5 sequence and a donor template sequence.

[0022] In one embodiment, the Cas14 protein comprises a sequence at least 70% identical to one of SEQ ID NOs:7-8.

[0023] In one embodiment, the NLS is a Ty1 or Ty2 NLS. In one embodiment, the NLS comprises a sequence at least 70% identical to one of SEQ ID NOs:53-54 and 361-973. In one embodiment, the Cas14 protein is catalytically deficient (dCas). In one embodiment, the fusion protein further comprises a retroviral integrase (IN) or a fragment thereof. In one embodiment, the IN comprises a sequence at least 70% identical to one of SEQ ID NOs:9-48. In one embodiment, the Cas14 protein is catalytically deficient (dCas).

[0024] In one embodiment, the fusion protein comprises a sequence at least 70% identical to one of SEQ ID NOs: 63-102 and 146. In one embodiment, the fusion protein comprises a sequence at least 70% identical to SEQ ID NO:145. In one embodiment, the guide RNA comprises a tracrRNA and a CRISPR RNA (crRNA). In one embodiment, the tracrRNA comprises a sequence at least 70% identical to one of SEQ ID NOs: 336-339.

### BRIEF DESCRIPTION OF THE DRAWINGS

[0025] The following detailed description of embodiments of the disclosure will be better understood when read in conjunction with the appended drawings. It should be understood, however, that the invention is not limited to the precise arrangements and instrumentalities of the embodiments shown in the drawings.

[0026] FIG. 1, comprising FIG. 1A through FIG. 1C, depicts experimental results demonstrating enhanced nuclear localization of retroviral Integrase-dCas9 fusion proteins for editing of mammalian genomic DNA. FIG. 1A depicts a schematic of the IN-dCas9 fusion proteins. FIG. 1B depicts the nuclear localization of IN-dCas9 fusion proteins. FIG. 1C depicts experimental results demonstrating the enzymatic activity of INΔC-dCas9 fusion protein to integrate an IRES-mCherry template targeted to the 3′UTRE of EF1-alpha in HEK293 cells.

[0027] FIG. 2 depicts a schematic of the nucleic acid editing technology showing that the fusion of viral Integrase (IN) with CRISPR-dCas9 allows for the integration of large DNA sequences in a target specific manner. This approach allows for the safe and permanent delivery of large gene sequences that normally exceed the limit of non-integrating AAV vectors.

[0028] FIG. 3 depicts the experimental design and experimental results of the GFP reporter cell line used quantify and characterize the fidelity of individual integration events in mammalian cells.

[0029] FIG. 4 depicts a schematic of the CRISPER-Cas9-mediated homology directed repair and the retroviral integrase-mediated random DNA integration.

[0030] FIG. 5 depicts a schematic of the Integrase-Cas genome editing.

[0031] FIG. 6 depicts schematics of the donor vector, generating blunt-ended templates, and generating 3′-processed templates.

[0032] FIG. 7 depicts the experimental design of the co-transfection of the INsrt templates, the IN-dCas9 vectors targeting the amilCP sequence were co-transfected into Cos7 cells.

[0033] FIG. 8 depicts the experimental design of the paired guide-RNAs specific the 3′UTR of the human EF1-alpha locus to knock-in the IGR-mCherry-2A-puromycin-pA cassette into the human HEK293 cell line and images of mCherry-positive cells 48 hours after transfection.

[0034] FIG. 9 depicts a schematic demonstrating directional editing

[0035] FIG. 10 depicts a schematic demonstrating multiplex genome editing for the generation of floxed alleles.

[0036] FIG. 11, comprising FIG. 11A through FIG. 11C, depicts experimental results demonstrating the efficiency of Ty1 NLS-like Sequences on Nuclear Localization of INΔC-Cas9 fusion proteins. FIG. 11A depicts the detection of INΔC-dCas9 fusion proteins containing a C-terminal classic SV40, Ty1 or Ty2 NLSs expressed in Cos-7 cells using an anti-FLAG antibody.

[0037] FIG. 11B depicts Ty1 NLS-like sequences isolated from yeast proteins can provide robust nuclear localization (MAK11) or no apparent localizing activity (IN04 and STH1). FIG. 11C depicts sequences of Ty1, Ty2 and Ty1 NLS-like sequences. Ty1 and Ty2 are highly conserved in both length and residue composition. Scale bars=10 μm.

[0038] FIG. 12, comprising FIG. 12A through FIG. 12C, depicts experimental results demonstrating that the Ty1 NLS enhances Cas9 DNA editing in mammalian cells. FIG. 12A depicts a diagram of the px330 CRISPR-Cas9 expression plasmid which encodes an hU6-driven single guide-RNA (sgRNA) and CAG driven Cas9 protein containing an N-terminal 3×FLAG tag, SV40 NLS and C-terminal NPM NLS. The Ty1 NLS was cloned in place of the NPM NLS in px330 (px330-Ty1). FIG. 12B depicts a frame-shift activated luciferase reporter was generated in which an upstream 20 nt target sequence (ts) interrupts the open reading from of a downstream luciferase open reading frame. Frameshifts induced by non-homologous end joining (NHEJ) reframe the downstream reporter and allow for Luciferase expression. FIG. 12C depicts co-expression of the frameshift-responsive luciferase reporter and px330 containing a single guide-RNA specific to the target sequence resulted in a ˜20-fold activation of luciferase activity, relative to a non-targeting sgRNA. Co-expression of px330-Ty1 resulted in a ˜44% enhancement over px330.

[0039] FIG. 13, comprising FIG. 13A through FIG. 13E, depicts genome targeting strategies for editing. Integration of DNA donor sequences can be targeted to different genome locations dependent upon the desired application. FIG. 13A depicts delivery of a DNA donor sequence carrying a gene cassette could be targeted to an intergenic ‘safe harbor’ locus to prevent disruption of neighbor or essential gene expression. FIG. 13B depicts delivery of a DNA donor sequence carrying a gene cassette could be targeted to a non-essential ‘safe harbor’ locus to prevent disruption of neighbor or essential gene expression. FIG. 13C depicts integration of a DNA sequence encoding a splice acceptor sequence (SA) could be delivered to an intron region of a gene (for example, the disease gene locus), which would allow for expression of the integrated sequence and prevent expression of the downstream sequence. FIG. 13D depicts integration of a DNA sequence encoding a splice acceptor sequence (SA) could be delivered to an intron region of a gene (for example, the disease gene locus), which would allow for expression of the integrated sequence and prevent expression of the downstream sequence. FIG. 13E depicts integration of a DNA donor sequence containing and Internal Ribosome Entry Sequence (IRES) into the 3′ UTR could allow for expression without disrupting expression from the endogenous locus.

[0040] FIG. 14 depicts a diagram of the lentiviral lifecycle. Lentivirus, a subclass of retrovirus, are single-stranded RNA viruses which integrate a permanent double-stranded DNA (dsDNA) copy of their proviral genomes into host cellular DNA. Following viral transduction, lentiviral RNA genomes are copied as blunt-ended dsDNA by viral-encoded reverse transcriptase (RT) and inserted into host genomes by Integrase I (IN). Lentiviral genomes are flanked by short (˜20 base pair) sequence motifs at their U3 and U5 termini which are required for proviral genome integration by IN. IN-mediated insertion of retroviral DNA occurs with little DNA target sequence specificity and can integrate into active gene loci, which can disrupt normal gene function and has the potential to cause disease in humans.

[0041] FIG. 15, comprising FIG. 15A through FIG. 15E, depicts genome editing in mammalian cells. Fusion of lentiviral Integrase to dCas9 allows for targeted non-homologous insertion of donor DNA sequences containing short viral termini. FIG. 15A depicts a diagram of a mammalian expression vector encoding a human U6-driven single-guide RNA (sgRNA) and Integrase-dCas9 fusion protein. FIG. 15B depicts a diagram showing a dsDNA Donor template containing an IGR IRES-mCherry-2A-Puromycin (puro) cassette flanked by U3/U5 viral motifs. FIG. 15C depicts a schematic Integrase-Cas9-mediated integration of this donor template into a CMV-eGFP reporter transgene stably expressed in COS-7 cells. FIG. 15D depicts a schematic demonstrating integrase-Cas9-mediated integration of this donor template into a CMV-eGFP reporter transgene stably expressed in COS-7 can result in disruption of eGFP expression while allowing mCherry expression. FIG. 15E depicts experimental results demonstrating loss of eGFP expression and gain of mCherry expression in edited COS-7 cells.

[0042] FIG. 16, comprising FIG. 16A through FIG. 16C, depicts traditional lentiviral gene delivery systems. FIG. 16A depicts a diagram of a lentiviral genome, which encodes viral proteins between flanking long terminal repeats (LTRs). FIG. 16B and FIG. 16C depicts schematics demonstrating that lentiviral genomes have been harnessed as a robust gene delivery tool. Lentiviral particles can be used to package, deliver and stably express donor transgene sequences. For lentiviral vector gene expression systems, viral polyproteins are removed from the viral genome and expressed using separate mammalian expression plasmids. Donor DNA sequences of interest can then be cloned in place of viral polyproteins between the flanking LTR sequences. Co-transfection of these vectors in mammalian packaging cells allows for the formation of lentiviral particles capable of delivering and integrating the encoded donor sequence, however do not require the coding information for Integrase and other viral proteins necessary for subsequent viral propagation. Lentiviral particles are a natural vector for the delivery of both viral proteins (ex. integrase and reverse transcriptase) and dsDNA donor sequences, which contain the necessary viral end sequences required for integrase-mediated insertion into mammalian cells. FIG. 16B depicts the generation of lentiviral vectors. FIG. 16C depicts the transduction of the lentiviral particle which deliver and stably express donor transgene sequences.

[0043] FIG. 17, comprising FIG. 17A through FIG. 17C, depicts targeted lentiviral integration. Existing lentiviral delivery systems can be modified to incorporate editing components for the purpose of targeted lentiviral donor template integration for genome editing in mammalian cells. FIG. 17A depicts one approach in which dCas9 is directly fused to Integrase (or to Integrase lacking its C-terminal non-specific DNA binding domain) within a lentiviral packaging plasmid (ex. psPax2) encoding the gag-pol polyprotein. FIG. 17B depicts that the modified gag-pol polyprotein is translated with other viral components as a polyprotein, loaded with guide-RNA and packaged into lentiviral particles. For this approach, the IN-dCas9 fusion protein retains the sequences necessary for protease cleavage (PR), and thus is cleaved normally from the gag-pol polyprotein during particle maturation. Transduction of mammalian cells results in the delivery of viral proteins, including the IN-dCas9 fusion protein, sgRNA, and lentiviral donor sequence. FIG. 17C depicts that upon lentiviral transduction, reverse transcription of the ssRNA genome by reverse transcriptase generates a dsDNA sequence containing correct viral end sequences (U3 and U5) which is Integrated into mammalian genomes by the IN-dCas9 fusion protein.

[0044] FIG. 18, comprising FIG. 18A through FIG. 18C, depicts targeted lentiviral integration via fusion to viral protein. FIG. 18A depicts expression and packaging of IN-dCas9 as N-terminal and C-terminal fusions with viral proteins (for example, viral protein R, VPR) as one approach to achieving targeted lentiviral gene integration. A viral protease cleavage sequence is included between VPR and the IN-dCas9 fusion protein, so that after maturation, the IN-dCas9 will be freed from VPR. FIG. 18B depicts that co-transfection of packaging cells with lentiviral components generates viral particles containing the VPR-IN-dCas9 protein and sgRNA. The packaging plasmid required for viral particle formation (ex. psPax2) contains a mutation within Integrase to inhibit its catalytic activity in the context of the packaging plasmid, thereby preventing non-Integrase-Cas9 mediated integration. FIG. 18C depicts that upon viral transduction, the IN-dCas9 protein is delivered as protein and mediates the integration of the lentiviral donor sequences. The benefit to delivery of the IN-dCas9 fusion and sgRNA as a riboprotein is that it is only be transiently expressed in the target cell.

[0045] FIG. 19, comprising FIG. 19A through FIG. 19C, depicts targeted lentiviral integration via incorporation into transfer plasmid. FIG. 19A depicts that expression of IN-dCas9 fusion protein and/or guide-RNA from within the viral transfer plasmid (or other viral vector, such as AAV) is one approach to achieving targeted lentiviral gene integration. FIG. 19B depicts that in this approach, the transfer plasmid containing the IN-dCas9 fusion protein and sgRNA is co-transfected with packaging and envelope plasmids required to generate lentiviral particles. If using a lentivirus, the packaging plasmid contains a catalytic mutation within Integrase to inhibit non-specific integration. FIG. 19C depicts that upon transduction of a mammalian cell, expression of the IN-dCas9 fusion protein and sgRNA generates components capable of targeting its own viral donor vector for targeted integration (self-integration). This method is used for targeted gene disruption or as a gene drive.

[0046] FIG. 20, comprising FIG. 20A through FIG. 20D, depicts co-delivery of a lentiviral donor sequence. FIG. 20A depicts co-transduction with a lentiviral particle encoding a donor DNA sequence could serve as the integrated donor template. FIG. 20B and FIG. 20C depict that prevention of self-integration of its own viral encoding sequence in this approach could be achieved by using Integrase enzymes from different retroviral family members and their corresponding transfer plasmids. FIG. 20B depicts generation of an HIV lentiviral particle encoding an IN (FIV)-dCas9 fusion protein. FIG. 20C depicts generation of an FIV lentiviral particle comprising an FIV transfer plasmid. FIG. 20D depicts that the HIV lentiviral particle encoding an IN(FIV)-dCas9 fusion protein is utilized to integrate an FIV donor template encoded within an FIV lentiviral particle.

[0047] FIG. 21 depicts targeted lentiviral integration in primary mammalian cells. This data demonstrates lentiviral packaging, delivery and targeted integration of a lentiviral donor template encoding an IRES-tdTO cassette into the ROSA26^{mG/+} locus in mouse embryonic fibroblasts. After two days, ubiquitous red fluorescent protein expression was detectable in MEFs transduced with lentivirus encoding the IRES-tdTO reporter, but retained GFP fluorescence. Remarkably, seven days post-transduction, tdTO red fluorescent cells were detectable in in culture, which lacked green fluorescence in ROSA26^{mG/+} primary cells.

[0048] FIG. 22 depicts targeted lentiviral integration in a mammalian stable cell line. This data demonstrates lentiviral packaging, delivery and targeted integration of a lentiviral donor template encoding an IRES-tdTO cassette into a stably expressed CMV-eGFP in COS-7 cells.

[0049] FIG. 23, comprising FIG. 23A through FIG. 23C depicts DNA Binding Domains for Targeted Integration of Lentiviral Particles. Replacement of the non-specific DNA binding domain of Integrase with the programmable DNA binding domain of dCas9 allows for targeted integration of dsDNA donor templates via delivery in lentiviral particles. Alternative DNA binding domains (such as TALENs) may be utilized for targeted integration as fusions to viral Integrase. Using a similar lentiviral production approach, replacement of dCas9 in our previous packaging strategies with TALENs targeting a specific sequence. FIG. 23A depicts TALENs packaged and delivered as a fusion to Integrase in the context of the gag-pol polyprotein. FIG. 23B depicts TALENs packaged and delivered as a fusion to Integrase as a fusion to a viral protein. FIG. 23C depicts TALENs packaged and delivered as a fusion to Integrase encoded within the transfer plasmid.

[0050] FIG. 24, comprising FIG. 24A through FIG. 24C, depicts experimental results demonstrating that the Ty1 NLS enhances Cas9 DNA editing in mammalian cells. FIG. 24A depicts a diagram of the px330 CRISPR-Cas9 expression plasmid which encodes an hU6-driven single guide-RNA (sgRNA) and CAG driven Cas9 protein containing an N-terminal 3×FLAG tag, SV40 NLS and C-terminal NPM NLS. The Ty1 NLS was cloned in place of the NPM NLS in px330 (px330-Ty1). FIG. 24B depicts results demonstrating a frame-shift activated luciferase reporter was generated in which an upstream 20 nt target sequence (ts) interrupts the open reading from of a downstream luciferase open reading frame. Frameshifts induced by non-homologous end joining (NHEJ) reframe the downstream reporter and allow for Luciferase expression. FIG. 24C depicts results demonstrating co-expression of the Frameshift-responsive luciferase reporter and px330 containing a single guide-RNA specific to the target sequence resulted in a ˜20 fold activation of luciferase activity, relative to a non-targeting sgRNA. Co-expression of px330-Ty1 resulted in a ˜44% enhancement over px330.

[0051] FIG. 25 depicts a schematic demonstrating TALENs can be utilized to direct retroviral integrase-mediated integration of a donor DNA template

[0052] FIG. 26 depicts a schematic of the plasmid DNA integration assay.

[0053] FIG. 27 depicts experimental data demonstrating that TALEN pair separated by 16 bp resulted in ˜6 fold more Chloramphenicol-resistant colonies, whereas a TALEN pair separated by 28 bp was similar to untargeted integrase.

[0054] FIG. 28 depicts the experimental design of the co-transfection of the INsrt templates, the IN-dCas9 vectors targeting the amilCP sequence were co-transfected into Cos7 cells.

[0055] FIG. 29, comprising FIG. 29A through FIG. 29C, depicts experimental results.

[0056] FIG. 29A depicts expression of amilCP chromoprotein in E coli results in purple E coli (white arrowhead). Integrase-Cas-mediated integration of donor sequences containing viral ends disrupt amilCP expression (orange arrowhead) (growth on kanamycin plates). FIG. 29B depicts integration of Insrt IGR-CAT donor template with either blunt ends (ScaI cleaved) or 3′ Processing mimic (FauI cleaved) ends into pCRII-amilCP reporter in mammalian cells. Interestingly, deletion of the C-terminal non-specific DNA binding domain, as a fusion to dCas9, does not inhibit Integrase-Cas mediated integration. Use of ends that mimic 3′ Processing show ˜2 fold increase in CAT resistant clones. FIG. 29C depicts an assessment of Integrase mutations on Integrase-Cas-mediated integration in plasmid DNA. Dimerization inhibiting mutations (E85G and E85F) do not disrupt Integrase-Cas-mediated integration using double guide-RNA targeted integration of IGR-CAT donor template into amilCP. However, the IN E87G mutation cannot be rescued by paired targeting sgRNAs. Interestingly, a tandem INAC fusion to dCas9 (tdINΔC-dCas9) shows ˜2 fold enhanced integration.

[0057] FIG. 30 depicts a schematic of treatment of treating Friedreich's Ataxia using Cas-IN fusion-Mediated Frataxin Gene Therapy.

[0058] FIG. 31 depicts the adaptation of CRISPR-Cas14 guide RNA sequences for expression by Pol III promoters in mammalian cells.

[0059] FIG. 32 depicts the activity of different CRISPR-Cas14 guide RNA sequences to edit and activation a frame-shift activated luciferase reporter in mammalian cells.

### DETAILED DESCRIPTION OF THE INVENTION

[0060] The present disclosure relates to fusion proteins, nucleic acids encoding fusion proteins, systems and methods for editing genetic material. In one embodiment, the disclosure relates to retroviral integrase (IN)-CRISPR-associated (Cas) fusion proteins and nucleic acid molecules encoding retroviral IN-Cas fusion proteins. In one embodiment, the IN-Cas fusion protein further comprises a nuclear localization signal (NLS). In one embodiment, the disclosure relates to Cas-NLS fusion proteins and nucleic acid molecules encoding retroviral Cas-NLS fusion proteins. In some embodiments, the disclosure provides methods of treating Friedreich's Ataxia comprising administering a fusion protein or nucleic acid of the disclosure.

### Definitions

[0061] Unless defined otherwise, all technical and scientific terms used herein have the same meaning as commonly understood by one of ordinary skill in the art to which this disclosure belongs.

[0062] Generally, the nomenclature used herein and the laboratory procedures in cell culture, molecular genetics, organic chemistry, and nucleic acid chemistry and hybridization are those well-known and commonly employed in the art.

[0063] Standard techniques are used for nucleic acid and peptide synthesis. The techniques and procedures are generally performed according to conventional methods in the art and various general references (e.g., Sambrook and Russell, 2012, Molecular Cloning, A Laboratory Approach, Cold Spring Harbor Press, Cold Spring Harbor, NY, and Ausubel et al., 2012, Current Protocols in Molecular Biology, John Wiley & Sons, NY), which are provided throughout this document.

[0064] The nomenclature used herein and the laboratory procedures used in analytical chemistry and organic syntheses described below are those well-known and commonly employed in the art. Standard techniques or modifications thereof are used for chemical syntheses and chemical analyses.

[0065] The term “a,” “an,” “the” and similar terms used in the context of the present invention (especially in the context of the claims) are to be construed to cover both the singular and plural unless otherwise indicated herein or clearly contradicted by the context.

[0066] “About” as used herein when referring to a measurable value such as an amount, a temporal duration, and the like, is meant to encompass variations of ±20%, or ±10%, or ±5%, or ±1%, or ±0.1% from the specified value, as such variations are appropriate to perform the disclosed methods.

[0067] “Antisense” refers particularly to the nucleic acid sequence of the non-coding strand of a double stranded DNA molecule encoding a protein, or to a sequence which is substantially homologous to the non-coding strand. As defined herein, an antisense sequence is complementary to the sequence of a double stranded DNA molecule encoding a protein. It is not necessary that the antisense sequence be complementary solely to the coding portion of the coding strand of the DNA molecule. The antisense sequence may be complementary to regulatory sequences specified on the coding strand of a DNA molecule encoding a protein, which regulatory sequences control expression of the coding sequences.

[0068] A “disease” is a state of health of an animal wherein the animal cannot maintain homeostasis, and wherein if the disease is not ameliorated then the animal's health continues to deteriorate.

[0069] In contrast, a “disorder” in an animal is a state of health in which the animal is able to maintain homeostasis, but in which the animal's state of health is less favorable than it would be in the absence of the disorder. Left untreated, a disorder does not necessarily cause a further decrease in the animal's state of health.

[0070] A disease or disorder is “alleviated” if the severity of a sign or symptom of the disease or disorder, the frequency with which such a sign or symptom is experienced by a patient, or both, is reduced.

[0071] “Encoding” refers to the inherent property of specific sequences of nucleotides in a polynucleotide, such as a gene, a cDNA, or an mRNA, to serve as templates for synthesis of other polymers and macromolecules in biological processes having either a defined sequence of nucleotides (i.e., rRNA, tRNA and mRNA) or a defined sequence of amino acids and the biological properties resulting therefrom. Thus, a gene encodes a protein if transcription and translation of mRNA corresponding to that gene produces the protein in a cell or other biological system. Both the coding strand, the nucleotide sequence of which is identical to the mRNA sequence and is usually provided in sequence listings, and the non-coding strand, used as the template for transcription of a gene or cDNA, can be referred to as encoding the protein or other product of that gene or cDNA.

[0072] The terms “patient,” “subject,” “individual,” and the like are used interchangeably herein, and refer to any animal, or cells thereof whether in vitro or in vivo, amenable to the methods described herein. In certain non-limiting embodiments, the patient, subject or individual is a human.

[0073] By the term “specifically binds,” as used herein with respect to an antibody, is meant an antibody which recognizes a specific antigen, but does not substantially recognize or bind other molecules in a sample. For example, an antibody that specifically binds to an antigen from one species may also bind to that antigen from one or more species. But, such cross-species reactivity does not itself alter the classification of an antibody as specific. In another example, an antibody that specifically binds to an antigen may also bind to different allelic forms of the antigen. However, such cross reactivity does not itself alter the classification of an antibody as specific.

[0074] In some instances, the terms “specific binding” or “specifically binding,” can be used in reference to the interaction of an antibody, a protein, or a peptide with a second chemical species, to mean that the interaction is dependent upon the presence of a particular structure (e.g., an antigenic determinant or epitope) on the chemical species; for example, an antibody recognizes and binds to a specific protein structure rather than to proteins generally. If an antibody is specific for epitope “A”, the presence of a molecule containing epitope A (or free, unlabeled A), in a reaction containing labeled “A” and the antibody, will reduce the amount of labeled A bound to the antibody.

[0075] A “coding region” of a gene consists of the nucleotide residues of the coding strand of the gene and the nucleotides of the non-coding strand of the gene which are homologous with or complementary to, respectively, the coding region of an mRNA molecule which is produced by transcription of the gene.

[0076] A “coding region” of a mRNA molecule also consists of the nucleotide residues of the mRNA molecule which are matched with an anti-codon region of a transfer RNA molecule during translation of the mRNA molecule or which encode a stop codon. The coding region may thus include nucleotide residues comprising codons for amino acid residues which are not present in the mature protein encoded by the mRNA molecule (e.g., amino acid residues in a protein export signal sequence).

[0077] “Complementary” as used herein to refer to a nucleic acid, refers to the broad concept of sequence complementarity between regions of two nucleic acid strands or between two regions of the same nucleic acid strand. It is known that an adenine residue of a first nucleic acid region is capable of forming specific hydrogen bonds (“base pairing”) with a residue of a second nucleic acid region which is antiparallel to the first region if the residue is thymine or uracil. Similarly, it is known that a cytosine residue of a first nucleic acid strand is capable of base pairing with a residue of a second nucleic acid strand which is antiparallel to the first strand if the residue is guanine. A first region of a nucleic acid is complementary to a second region of the same or a different nucleic acid if, when the two regions are arranged in an antiparallel fashion, at least one nucleotide residue of the first region is capable of base pairing with a residue of the second region. In one embodiment, the first region comprises a first portion and the second region comprises a second portion, whereby, when the first and second portions are arranged in an antiparallel fashion, at least about 50%, at least about 75%, at least about 90%, or at least about 95% of the nucleotide residues of the first portion are capable of base pairing with nucleotide residues in the second portion. In one embodiment, all nucleotide residues of the first portion are capable of base pairing with nucleotide residues in the second portion.

[0078] The term “DNA” as used herein is defined as deoxyribonucleic acid.

[0079] The term “expression” as used herein is defined as the transcription and/or translation of a particular nucleotide sequence driven by its promoter.

[0080] The term “expression vector” as used herein refers to a vector containing a nucleic acid sequence coding for at least part of a gene product capable of being transcribed. In some cases, RNA molecules are then translated into a protein, polypeptide, or peptide. In other cases, these sequences are not translated, for example, in the production of antisense molecules, siRNA, ribozymes, and the like. Expression vectors can contain a variety of control sequences, which refer to nucleic acid sequences necessary for the transcription and possibly translation of an operatively linked coding sequence in a particular host organism. In addition to control sequences that govern transcription and translation, vectors and expression vectors may contain nucleic acid sequences that serve other functions as well.

[0081] As used herein the term “wild type” is a term of the art understood by skilled persons and means the typical form of an organism, strain, gene or characteristic as it occurs in nature as distinguished from mutant or variant forms.

[0082] The term “homology” refers to a degree of complementarity. There may be partial homology or complete homology (i.e., identity). Homology is often measured using sequence analysis software (e.g., Sequence Analysis Software Package of the Genetics Computer Group. University of Wisconsin Biotechnology Center. 1710 University Avenue. Madison, Wis. 53705). Such software matches similar sequences by assigning degrees of homology to various substitutions, deletions, insertions, and other modifications. Conservative substitutions typically include substitutions within the following groups: glycine, alanine; valine, isoleucine, leucine; aspartic acid, glutamic acid, asparagine, glutamine; serine, threonine; lysine, arginine; and phenylalanine, tyrosine.

[0083] “Isolated” means altered or removed from the natural state. For example, a nucleic acid or a peptide naturally present in its normal context in a living animal is not “isolated,” but the same nucleic acid or peptide partially or completely separated from the coexisting materials of its natural context is “isolated.” An isolated nucleic acid or protein can exist in substantially purified form, or can exist in a non-native environment such as, for example, a host cell.

[0084] The term “isolated” when used in relation to a nucleic acid, as in “isolated oligonucleotide” or “isolated polynucleotide” refers to a nucleic acid sequence that is identified and separated from at least one contaminant with which it is ordinarily associated in its source. Thus, an isolated nucleic acid is present in a form or setting that is different from that in which it is found in nature. In contrast, non-isolated nucleic acids (e.g., DNA and RNA) are found in the state they exist in nature. For example, a given DNA sequence (e.g., a gene) is found on the host cell chromosome in proximity to neighboring genes; RNA sequences (e.g., a specific mRNA sequence encoding a specific protein), are found in the cell as a mixture with numerous other mRNAs that encode a multitude of proteins. However, isolated nucleic acid includes, by way of example, such nucleic acid in cells ordinarily expressing that nucleic acid where the nucleic acid is in a chromosomal location different from that of natural cells, or is otherwise flanked by a different nucleic acid sequence than that found in nature. The isolated nucleic acid or oligonucleotide may be present in single-stranded or double-stranded form. When an isolated nucleic acid or oligonucleotide is to be utilized to express a protein, the oligonucleotide contains at a minimum, the sense or coding strand (i.e., the oligonucleotide may be single-stranded), but may contain both the sense and anti-sense strands (i.e., the oligonucleotide may be double-stranded).

[0085] The term “isolated” when used in relation to a polypeptide, as in “isolated protein” or “isolated polypeptide” refers to a polypeptide that is identified and separated from at least one contaminant with which it is ordinarily associated in its source. Thus, an isolated polypeptide is present in a form or setting that is different from that in which it is found in nature. In contrast, non-isolated polypeptides (e.g., proteins and enzymes) are found in the state they exist in nature.

[0086] By “nucleic acid” is meant any nucleic acid, whether composed of deoxyribonucleosides or ribonucleosides, and whether composed of phosphodiester linkages or modified linkages such as phosphotriester, phosphoramidate, siloxane, carbonate, carboxymethylester, acetamidate, carbamate, thioether, bridged phosphoramidate, bridged methylene phosphonate, phosphorothioate, methylphosphonate, phosphorodithioate, bridged phosphorothioate or sulfone linkages, and combinations of such linkages. The term nucleic acid also specifically includes nucleic acids composed of bases other than the five biologically occurring bases (adenine, guanine, thymine, cytosine and uracil). The term “nucleic acid” typically refers to large polynucleotides.

[0087] Conventional notation is used herein to describe polynucleotide sequences: the left-hand end of a single-stranded polynucleotide sequence is the 5′-end; the left-hand direction of a double-stranded polynucleotide sequence is referred to as the 5′-direction.

[0088] The direction of 5′ to 3′ addition of nucleotides to nascent RNA transcripts is referred to as the transcription direction. The DNA strand having the same sequence as an mRNA is referred to as the “coding strand”; sequences on the DNA strand which are located 5′ to a reference point on the DNA are referred to as “upstream sequences”; sequences on the DNA strand which are 3′ to a reference point on the DNA are referred to as “downstream sequences.”

[0089] By “expression cassette” is meant a nucleic acid molecule comprising a coding sequence operably linked to promoter/regulatory sequences necessary for transcription and, optionally, translation of the coding sequence.

[0090] The term “operably linked” as used herein refer to the linkage of nucleic acid sequences in such a manner that a nucleic acid molecule capable of directing the transcription of a given gene and/or the synthesis of a desired protein molecule is produced. The term also refers to the linkage of sequences encoding amino acids in such a manner that a functional (e.g., enzymatically active, capable of binding to a binding partner, capable of inhibiting, etc.) protein or polypeptide is produced.

[0091] As used herein, the term “promoter/regulatory sequence” means a nucleic acid sequence which is required for expression of a gene product operably linked to the promoter/regulator sequence. In some instances, this sequence may be the core promoter sequence and in other instances, this sequence may also include an enhancer sequence and other regulatory elements which are required for expression of the gene product. The promoter/regulatory sequence may, for example, be one which expresses the gene product in a n inducible manner.

[0092] As used herein, “stringent conditions” for hybridization refer to conditions under which a nucleic acid having complementarity to a target sequence predominantly hybridizes with the target sequence, and substantially does not hybridize to non-target sequences. Stringent conditions are generally sequence-dependent, and vary depending on a number of factors. In general, the longer the sequence, the higher the temperature at which the sequence specifically hybridizes to its target sequence. Non-limiting examples of stringent conditions are described in detail in Tijssen (1993), Laboratory Techniques In Biochemistry And Molecular Biology-Hybridization With Nucleic Acid Probes Part 1, Second Chapter “Overview of principles of hybridization and the strategy of nucleic acid probe assay”, Elsevier, N.Y.

[0093] “Hybridization” refers to a reaction in which one or more polynucleotides react to form a complex that is stabilized via hydrogen bonding between the bases of the nucleotide residues. The hydrogen bonding may occur by Watson Crick base pairing, Hoogstein binding, or in any other sequence specific manner. The complex may comprise two strands forming a duplex structure, three or more strands forming a multi stranded complex, a single self-hybridizing strand, or any combination of these. A hybridization reaction may constitute a step in a more extensive process, such as the initiation of PCR, or the cleavage of a polynucleotide by an enzyme. A sequence capable of hybridizing with a given sequence is referred to as the “complement” of the given sequence.

[0094] An “inducible” promoter is a nucleotide sequence which, when operably linked with a polynucleotide which encodes or specifies a gene product, causes the gene product to be produced substantially only when an inducer which corresponds to the promoter is present.

[0095] A “constitutive” promoter is a nucleotide sequence which, when operably linked with a polynucleotide which encodes or specifies a gene product, causes the gene product to be produced in a cell under most or all physiological conditions of the cell.

[0096] The term “polynucleotide” as used herein is defined as a chain of nucleotides. Furthermore, nucleic acids are polymers of nucleotides. Thus, nucleic acids and polynucleotides as used herein are interchangeable. One skilled in the art has the general knowledge that nucleic acids are polynucleotides, which can be hydrolyzed into the monomeric “nucleotides.” The monomeric nucleotides can be hydrolyzed into nucleosides. As used herein polynucleotides include, but are not limited to, all nucleic acid sequences which are obtained by any means available in the art, including, without limitation, recombinant means, i.e., the cloning of nucleic acid sequences from a recombinant library or a cell genome, using ordinary cloning technology and PCR, and the like, and by synthetic means.

[0097] In the context of the present disclosure, the following abbreviations for the commonly occurring nucleic acid bases are used. “A” refers to adenosine, “C” refers to cytosine, “G” refers to guanosine, “T” refers to thymidine, and “U” refers to uridine.

[0098] As used herein, the terms “peptide,” “polypeptide,” and “protein” are used interchangeably, and refer to a compound comprised of amino acid residues covalently linked by peptide bonds. A protein or peptide must contain at least two amino acids, and no limitation is placed on the maximum number of amino acids that can comprise a protein's or peptide's sequence. Polypeptides include any peptide or protein comprising two or more amino acids joined to each other by peptide bonds. As used herein, the term refers to both short chains, which also commonly are referred to in the art as peptides, oligopeptides and oligomers, for example, and to longer chains, which generally are referred to in the art as proteins, of which there are many types. “Polypeptides” include, for example, biologically active fragments, substantially homologous polypeptides, oligopeptides, homodimers, heterodimers, variants of polypeptides, modified polypeptides, derivatives, analogs, fusion proteins, among others. The polypeptides include natural peptides, recombinant peptides, synthetic peptides, or a combination thereof.

[0099] The term “RNA” as used herein is defined as ribonucleic acid.

[0100] “Recombinant polynucleotide” refers to a polynucleotide having sequences that are not naturally joined together. An amplified or assembled recombinant polynucleotide may be included in a suitable vector, and the vector can be used to transform a suitable host cell.

[0101] A recombinant polynucleotide may serve a non-coding function (e.g., promoter, origin of replication, ribosome-binding site, etc.) as well.

[0102] The term “recombinant polypeptide” as used herein is defined as a polypeptide produced by using recombinant DNA methods.

[0103] As used herein, “Transcription Activator-Like Effector Nucleases (TALENs)” are artificial restriction enzymes generated by fusing the TAL effector DNA binding domain to a DNA cleavage domain. These reagents enable efficient, programmable, and specific DNA cleavage and represent powerful tools for editing genetic material in situ. Transcription activator-like effectors (TALEs) can be quickly engineered to bind practically any DNA sequence. The term TALEN, as used herein, is broad and includes a monomeric TALEN that can cleave double stranded DNA without assistance from another TALEN. The term TALEN is also used to refer to one or both members of a pair of TALENs that are engineered to work together to cleave DNA at the same site. TALENs that work together may be referred to as a left-TALEN and a right-TALEN, which references the handedness of DNA. See U.S. Ser. No. 12/965,590; U.S. Ser. No. 13/426,991 (U.S. Pat. No. 8,450,471); U.S. Ser. No. 13/427,040 (U.S. Pat. No. 8,440,431); U.S. Ser. No. 13/427,137 (U.S. Pat. No. 8,440,432); and U.S. Ser. No. 13/738,381, all of which are incorporated by reference herein in their entirety.

[0104] “Variant” as the term is used herein, is a nucleic acid sequence or a peptide sequence that differs in sequence from a reference nucleic acid sequence or peptide sequence respectively, but retains essential biological properties of the reference molecule. Changes in the sequence of a nucleic acid variant may not alter the amino acid sequence of a peptide encoded by the reference nucleic acid, or may result in amino acid substitutions, additions, deletions, fusions and truncations. Changes in the sequence of peptide variants are typically limited or conservative, so that the sequences of the reference peptide and the variant are closely similar overall and, in many regions, identical. A variant and reference peptide can differ in amino acid sequence by one or more substitutions, additions, deletions in any combination. A variant of a nucleic acid or peptide can be a naturally occurring such as an allelic variant, or can be a variant that is not known to occur naturally. Non-naturally occurring variants of nucleic acids and peptides may be made by mutagenesis techniques or by direct synthesis.

[0105] A “vector” is a composition of matter which comprises an isolated nucleic acid and which can be used to deliver the isolated nucleic acid to the interior of a cell. Numerous vectors are known in the art including, but not limited to, linear polynucleotides, polynucleotides associated with ionic or amphiphilic compounds, plasmids, and viruses. Thus, the term “vector” includes an autonomously replicating plasmid or a virus. The term should also be construed to include non-plasmid and non-viral compounds which facilitate transfer of nucleic acid into cells, such as, for example, polylysine compounds, liposomes, and the like. Examples of viral vectors include, but are not limited to, adenoviral vectors, adeno-associated virus vectors, retroviral vectors, and the like.

[0106] Ranges: throughout this disclosure, various aspects of the invention can be presented in a range format. It should be understood that the description in range format is merely for convenience and brevity and should not be construed as an inflexible limitation on the scope of the invention. Accordingly, the description of a range should be considered to have specifically disclosed all the possible subranges as well as individual numerical values within that range. For example, description of a range such as from 1 to 6 should be considered to have specifically disclosed subranges such as from 1 to 3, from 1 to 4, from 1 to 5, from 2 to 4, from 2 to 6, from 3 to 6 etc., as well as individual numbers within that range, for example, 1, 2, 2.7, 3, 4, 5, 5.3, and 6. This applies regardless of the breadth of the range.

### Proteins

[0107] In one aspect, the present disclosure is based on the development of novel fusions of editing proteins which are effectively delivered to the nucleus. In one embodiment, the protein comprises a nuclear localization signal (NLS). In on embodiment, the fusion protein comprises an editing protein and an integrase protein. In one embodiment, the fusion protein comprises a purification and/or detection tag.

[0108] In one aspect, the disclosure is based in part on the development of novel editing proteins that are effectively delivered to the nucleus. In one embodiment, the editing protein is a CRISPR-associated (Cas) protein. In one embodiment, the protein further comprises a nuclear localization signal. Thus, in one aspect, the present disclosure provides fusion proteins comprising a Cas protein and a nuclear localization signal (NLS).

[0109] In one aspect, the disclosure is based in part on the development of novel fusions of editing proteins and retroviral integrase proteins which are effectively delivered to the nucleus. These fusion proteins combine the DNA integration activity of viral integrase and the programmable DNA targeting capability of catalytically dead Cas. Thus, since this fusion protein does not rely on cellular pathways for DNA insertion, or require cellular energy source, such as ATP, this enzyme can work in many contexts, such as from in vitro, to prokaryotic cells, to dividing or non-dividing eukaryotic cells. Further, because integrase does not require regions of homology for insertion, only small terminal motif sequences specific to each integrase family, these fusion proteins editing can utilize a single DNA donor template for multiplex genome integration, if guided by multiple guide-RNAs. Thus, in one aspect, the present disclosure provides fusion proteins comprising a Cas protein, a nuclear localization signal (NLS), and a retroviral integrase (IN) or a fragment or variant thereof.

### Editing Proteins

[0110] In one embodiment, the fusion protein comprises an editing protein. In one embodiment, the editing protein includes, but is not limited to, a CRISPR-associated (Cas) protein, transcription activator-like effector-based nuclease (TALEN) protein, a zinc finger nuclease (ZFN) protein, and a protein having a DNA binding domain.

[0111] Non-limiting examples of Cas proteins include Cas1, Cas1B, Cas2, Cas3, Cas4, Cas5, Cas6, Cas7, Cas8, Cas9, Cas10, Cas14, Csy1, Csy2, Csy3, Cse1, Cse2, Csc1, Csc2, Csa5, Csn2. Csm2, Csm3, Csm4, Csm5, Csm6, Cmr1, Cmr3, Cmr4, Cmr5, Cmr6, Csb1, Csb2, Csb3, Csx17, Csx14, Csx10, Csx16, CsaX, Csx3, Csx1, Csx15, Csf1, Csf2, Csf3, Csf4, SpCas9, StCas9, NmCas9, SaCas9, CjCas9, CjCas9, AsCpf1, LbCpf1, FnCpf1, VRER SpCas9, VQR SpCas9, xCas9 3.7, homologs thereof, orthologs thereof, or modified versions thereof. In some embodiments, the Cas protein has DNA cleavage activity. In some embodiments, the Cas protein directs cleavage of one or both strands of a nucleic acid molecule at the location of a target sequence, such as within the target sequence and/or within the complement of the target sequence. In some embodiments, the Cas protein directs cleavage of one or both strands within about 1, 2, 3, 4, 5, 6, 7, 8, 9, 10, 15, 20, 25, 50, 100, 200, 500, or more base pairs from the first or last nucleotide of a target sequence. In one embodiment, the Cas protein is Cas9 or Cas14. In one embodiment, Cas protein is Cas9. In one embodiment, Cas protein is Cas14. In one embodiment, Cas protein is catalytically deficient (dCas).

[0112] In one embodiment, the Cas protein comprises a sequence at least 70%, at least 71%, at least 72%, at least 73%, at least 74%, at least 75%, at least 76%, at least 77%, at least 78%, at least 79%, 80%, at least 81%, at least 82%, at least 83%, at least 84%, at least 85%, at least 86%, at least 87%, at least 88%, at least 89%, 90%, at least 91%, at least 92%, at least 93%, at least 94%, at least 95%, at least 96%, at least 97%, at least 98%, or at least 99% identical to one of SEQ ID NOs:1-8. In one embodiment, the Cas protein comprises a sequence of one of SEQ ID NOs:1-8. In one embodiment, the Cas protein comprises a sequence of one of SEQ ID NOs:1, 3, 5 or 7. In one embodiment, the Cas protein comprises a sequence of one of SEQ ID NOs:2, 4, 6 or 8. In one embodiment, the Cas protein comprises a sequence of one of SEQ ID NOs:1 or 2. In one embodiment, the Cas protein comprises a sequence of one of SEQ ID NOs:6 or 7.

### Nuclear Localization Signal

[0113] In some embodiments, the protein contains a nuclear localization signal (NLS). In one embodiment, the protein comprises a NLS. In one embodiment, the NLS is a retrotransposon NLS. In one embodiment, the NLS is derived from Ty1, yeast GAL4, SKI3, L29 or histone H2B proteins, polyoma virus large T protein, VP1 or VP2 capsid protein, SV40 VP1 or VP2 capsid protein, Adenovirus Ela or DBP protein, influenza virus NS1 protein, hepatitis vims core antigen or the mammalian lamin, c-myc, max, c-myb, p53, c-erbA, jun, Tax, steroid receptor or Mx proteins, Nucleoplasmin (NPM2), Nucleophosmin (NPM1), or simian vims 40 (“SV40”) T-antigen. In one embodiment, the NLS is a Ty1 or Ty1-derived NLS, a Ty2 or Ty2-derived NLS or a MAKI1 or MAK11-derived NLS.

[0114] In one embodiment, the Ty1 NLS comprises an amino acid sequence of SEQ ID NO:53. In one embodiment, the Ty2 NLS comprises an amino acid sequence of SEQ ID NO:54. In one embodiment, the MAK11 NLS comprises an amino acid sequence of SEQ ID NO:56. In one embodiment, the NLS comprises a sequence at least 70%, at least 71%, at least 72%, at least 73%, at least 74%, at least 75%, at least 76%, at least 77%, at least 78%, at least 79%, at least 80%, at least 81%, at least 82%, at least 83%, at least 84%, at least 85%, at least 86%, at least 87%, at least 88%, at least 89%, at least 90%, at least 91%, at least 92%, at least 93%, at least 94%, at least 95%, at least 96%, at least 97%, at least 98%, or at least 99% identical to one of SEQ ID NOs: 49-62 and 361-973. In one embodiment, the NLS comprises a sequence of one of SEQ ID NOs: 49-62 and 361-973.

[0115] In one embodiment, the NLS is a Ty1-like NLS. For example, in one embodiment, the Ty1-like NLS comprises KKRX motif. In one embodiment, the Ty1-like NLS comprises KKRX motif at the N-terminal end. In one embodiment, the Ty1-like NLS comprises KKR motif. In one embodiment, the Ty1-like NLS comprises KKR motif at the C-terminal end. In one embodiment, the Ty1-like NLS comprises a KKRX and a KKR motif. In one embodiment, the Ty1-like NLS comprises a KKRX at the N-terminal end and a KKR motif at the C-terminal end. In one embodiment, the Ty1-like NLS comprises at least 20 amino acids. In one embodiment, the Ty1-like NLS comprises between 20 and 40 amino acids. In one embodiment, the Ty1-like NLS comprises a sequence at least 70%, at least 71%, at least 72%, at least 73%, at least 74%, at least 75%, at least 76%, at least 77%, at least 78%, at least 79%, at least 80%, at least 81%, at least 82%, at least 83%, at least 84%, at least 85%, at least 86%, at least 87%, at least 88%, at least 89%, at least 90%, at least 91%, at least 92%, at least 93%, at least 94%, at least 95%, at least 96%, at least 97%, at least 98%, or at least 99% identical to one of SEQ ID NOs: 361-973. In one embodiment, the NLS comprises a sequence of one of SEQ ID NOs: 361-973, wherein the sequence comprises one or more, two or more, three or more, four or more, five or more, six or more, seven or more, eight or more, nine or more, or ten or more, insertions, deletions or substitutions. In one embodiment, the Ty1-like NLS comprises a sequence of one of SEQ ID NOs: 361-973.

[0116] In one embodiment, the NLS comprises a combination of two distinct NLS. For example, in one embodiment, the NLS comprises a Ty1-derived NLS and a SV40-derived NLS. In one embodiment, the NLS is a Ty1 or Ty1-derived NLS, a Ty2 or Ty2-derived NLS or a MAK11 or MAK11-derived NLS. In one embodiment, the Ty1 NLS comprises an amino acid sequence of SEQ ID NO:53. In one embodiment, the Ty2 NLS comprises an amino acid sequence of SEQ ID NO: 54. In one embodiment, the MAK11 NLS comprises an amino acid sequence of SEQ ID NO:56.

[0117] In one embodiment, the NLS comprises two copies of the same NLS. For example, in one embodiment, the NLS comprises a multimer of a first Ty1-derived NLS and a second Ty1-derived NLS.

[0118] In one embodiment, the NLS comprises a first sequence at least 70%, at least 71%, at least 72%, at least 73%, at least 74%, at least 75%, at least 76%, at least 77%, at least 78%, at least 79%, 80%, at least 81%, at least 82%, at least 83%, at least 84%, at least 85%, at least 86%, at least 87%, at least 88%, at least 89%, 90%, at least 91%, at least 92%, at least 93%, at least 94%, at least 95%, at least 96%, at least 97%, at least 98%, or at least 99% to one of SEQ ID NOs: 49-62 and 361-973, and a second a sequence at least 70%, at least 71%, at least 72%, at least 73%, at least 74%, at least 75%, at least 76%, at least 77%, at least 78%, at least 79%, 80%, at least 81%, at least 82%, at least 83%, at least 84%, at least 85%, at least 86%, at least 87%, at least 88%, at least 89%, 90%, at least 91%, at least 92%, at least 93%, at least 94%, at least 95%, at least 96%, at least 97%, at least 98%, or at least 99% to one of SEQ ID NOs: 49-62 and 361-973. In one embodiment, the NLS comprises a first sequence of one of SEQ ID NOs: 49-62 and 361-973 and a second sequence of one of SEQ ID NOs: 49-62 and 361-973. In one embodiment, the first sequence and second sequence are the same. In one embodiment, the first sequence and second sequence are different.

[0119] In one embodiment, the NLS comprises a sequence at least 70%, at least 71%, at least 72%, at least 73%, at least 74%, at least 75%, at least 76%, at least 77%, at least 78%, at least 79%, 80%, at least 81%, at least 82%, at least 83%, at least 84%, at least 85%, at least 86%, at least 87%, at least 88%, at least 89%, 90%, at least 91%, at least 92%, at least 93%, at least 94%, at least 95%, at least 96%, at least 97%, at least 98%, or at least 99% to one of SEQ ID NOs: 58-61. In one embodiment, the NLS comprises a sequence of one of SEQ ID NOs: 58-61.

### Retroviral Integrase

[0120] In one embodiment, the retroviral IN is human immunodeficiency virus (HIV) IN, Rous sarcoma virus (RSV) IN, Mouse mammary tumor virus (MMTV) IN, Moloney murine leukemia virus (MoLV) IN, bovine leukemia virus (BLV) IN, Human T-lymphotropic virus (HTLV) IN, avian sarcoma leukosis virus (ASLV) IN, feline leukemia virus (FLV) IN, xenotropic murine leukemia virus-related virus (XMLV) IN, simian immunodeficiency virus (SIV) IN, feline immunodeficiency virus (FIV) IN, equine infectious anemia virus (EIAV) IN, Prototype foamy virus (PFV) IN, simian foamy virus (SFV) IN, human foamy virus (HFV) IN, walleye dermal sarcoma virus (WDSV) IN, or bovine immunodeficiency virus (BIV) IN.

[0121] In one embodiment, the integrase is a retrotransposon integrase. In one embodiment, the retrotransposon integrase is Ty1, or Ty2. In one embodiment, the integrase is a bacterial integrase. In one embodiment, the bacterial integrase is insF.

[0122] In one embodiment, the retroviral IN is HIV IN. In one embodiment, the HIV IN comprises one or more amino acid substitutions, wherein the substitution improves catalytic activity, improves solubility, or increases interaction with one or more host cellular cofactors. In one embodiment, HIV IN comprises one or more, two or more, three or more, four or more, five or more, six or more, seven or more, eight or more or nine amino acid substitutions selected from the group consisting of E85G, E85F, D116N, F185K, C280S, T97A, Y134R, G140S, and Q148H. In one embodiment, HIV IN comprises amino acid substitutions F185K and C280S. In one embodiment, HIV IN comprises amino acid substitutions T97A and Y134R. In one embodiment, HIV IN comprises amino acid substitutions G140S and Q148H.

[0123] In one embodiment, the retroviral IN fragment comprises the IN N-terminal domain (NTD), and the IN catalytic core domain (CCD). In one embodiment, the retroviral IN fragment comprises the IN CCD and the IN C-terminal domain (CTD). In one embodiment, the retroviral IN fragment comprises the IN NTD. In one embodiment, the retroviral IN fragment comprises the IN CCD. In one embodiment, the retroviral IN fragment comprises the IN CTD. The in one embodiment, the fragments of the integrase retain at least one activity of the full length integrase. Retroviral integrase functions and fragments are known in the art and can be found in, for example, Li, et al., 2011, Virology 411:194-205, and Maertens et al., 2010, Nature 468:326-29, which are incorporated by reference herein.

[0124] In one embodiment, the retroviral IN comprises a sequence at least 70%, at least 71%, at least 72%, at least 73%, at least 74%, at least 75%, at least 76%, at least 77%, at least 78%, at least 79%, 80%, at least 81%, at least 82%, at least 83%, at least 84%, at least 85%, at least 86%, at least 87%, at least 88%, at least 89%, 90%, at least 91%, at least 92%, at least 93%, at least 94%, at least 95%, at least 96%, at least 97%, at least 98%, or at least 99% identical to one of SEQ ID NOs:9-48. In one embodiment, the retroviral IN comprises a sequence of one of SEQ ID NOs: 9-48.

Purification and/or Detection Tag

[0125] In some embodiments, the protein may contain a purification and/or detection tag. In one embodiment, the tag is on the N-terminal end of the protein. In one embodiment, the tag is a 3×FLAG tag. In one embodiment, the tag comprises an amino acid sequence at least 70%, at least 71%, at least 72%, at least 73%, at least 74%, at least 75%, at least 76%, at least 77%, at least 78%, at least 79%, at least 80%, at least 81%, at least 82%, at least 83%, at least 84%, at least 85%, at least 86%, at least 87%, at least 88%, at least 89%, at least 90%, at least 91%, at least 92%, at least 93%, at least 94%, at least 95%, at least 96%, at least 97%, at least 98%, or at least 99% identical to SEQ ID NO:51. In one embodiment, the tag comprises an amino acid sequence of SEQ ID NO:51.

### Fusion Proteins

[0126] In one aspect, the present disclosure provides fusion proteins comprising a Cas protein and a nuclear localization signal (NLS) described herein. In one embodiment, the fusion protein comprises an amino acid sequence 70%, at least 71%, at least 72%, at least 73%, at least 74%, at least 75%, at least 76%, at least 77%, at least 78%, at least 79%, at least 80%, at least 81%, at least 82%, at least 83%, at least 84%, at least 85%, at least 86%, at least 87%, at least 88%, at least 89%, at least 90%, at least 91%, at least 92%, at least 93%, at least 94%, at least 95%, at least 96%, at least 97%, at least 98%, or at least 99% identical to one of SEQ ID NOs:147-149. In one embodiment, the protein comprises an amino acid sequence of one of SEQ ID NOs: 147-149. In one embodiment, the protein comprises an amino acid sequence of SEQ ID NOs: 149.

[0127] In one aspect, the present disclosure provides fusion proteins comprising a Cas protein, a nuclear localization signal (NLS), and a retroviral integrase (IN) or a fragment or variant thereof described herein. In one embodiment, the fusion protein comprises a sequence at least 70%, at least 71%, at least 72%, at least 73%, at least 74%, at least 75%, at least 76%, at least 77%, at least 78%, at least 79%, 80%, at least 81%, at least 82%, at least 83%, at least 84%, at least 85%, at least 86%, at least 87%, at least 88%, at least 89%, 90%, at least 91%, at least 92%, at least 93%, at least 94%, at least 95%, at least 96%, at least 97%, at least 98%, or at least 99% identical to one of SEQ ID NOs:63-142. In one embodiment, the fusion protein comprises a sequence of one of SEQ ID NOs:63-142. In one embodiment the fusion protein further comprise a purification and/or detection tag. In one embodiment, the fusion protein comprises a sequence at least 70%, at least 71%, at least 72%, at least 73%, at least 74%, at least 75%, at least 76%, at least 77%, at least 78%, at least 79%, 80%, at least 81%, at least 82%, at least 83%, at least 84%, at least 85%, at least 86%, at least 87%, at least 88%, at least 89%, 90%, at least 91%, at least 92%, at least 93%, at least 94%, at least 95%, at least 96%, at least 97%, at least 98%, or at least 99% identical to one of SEQ ID NOs:143-146. In one embodiment, the fusion protein comprises a sequence of one of SEQ ID NOs: 143-146.

### Proteins, Peptides and Fusion Proteins

[0128] The proteins of the present disclosure may be made using chemical methods. For example, protein can be synthesized by solid phase techniques (Roberge J Y et al (1995) Science 269: 202-204), cleaved from the resin, and purified by preparative high-performance liquid chromatography. Automated synthesis may be achieved, for example, using the ABI 431 A Peptide Synthesizer (Perkin Elmer) in accordance with the instructions provided by the manufacturer.

[0129] The proteins of the present disclosure may be made using recombinant protein expression. The recombinant expression vectors of the disclosure comprise a nucleic acid of the disclosure in a form suitable for expression of the nucleic acid in a host cell, which means that the recombinant expression vectors include one or more regulatory sequences, selected on the basis of the host cells to be used for expression, that is operatively-linked to the nucleic acid sequence to be expressed. Within a recombinant expression vector, “operably-linked” is intended to mean that the nucleotide sequence of interest is linked to the regulatory sequences in a manner that allows for expression of the nucleotide sequence (e.g., in an in vitro transcription/translation system or in a host cell when the vector is introduced into the host cell).

[0130] The term “regulatory sequence” is intended to include promoters, enhancers and other expression control elements (e.g., polyadenylation signals). Such regulatory sequences are described, for example, in Goeddel, Gene Expression Technology: Methods in Enzymology 185, Academic Press, San Diego, Calif. (1990). Regulatory sequences include those that direct constitutive expression of a nucleotide sequence in many types of host cell and those that direct expression of the nucleotide sequence only in certain host cells (e.g., tissue-specific regulatory sequences). It will be appreciated by those skilled in the art that the design of the expression vector can depend on such factors as the choice of the host cell to be transformed, the level of expression of protein desired, etc. The expression vectors of the disclosure can be introduced into host cells to thereby produce proteins or peptides, including fusion proteins or peptides, encoded by nucleic acids as described herein.

[0131] The recombinant expression vectors of the disclosure can be designed for production of variant proteins in prokaryotic or eukaryotic cells. For example, proteins of the disclosure can be expressed in bacterial cells such as Escherichia coli, insect cells (using baculovirus expression vectors) yeast cells or mammalian cells. Suitable host cells are discussed further in Goeddel, Gene Expression Technology: Methods in Enzymology 185, Academic Press, San Diego, Calif. (1990). Alternatively, the recombinant expression vector can be transcribed and translated in vitro, for example using T7 promoter regulatory sequences and T7 polymerase.

[0132] Expression of proteins in prokaryotes is most often carried out in Escherichia coli with vectors containing constitutive or inducible promoters directing the expression of either fusion or non-fusion proteins. Fusion vectors add a number of amino acids to a protein encoded therein, to the amino or C terminus of the recombinant protein. Such fusion vectors typically serve three purposes: (i) to increase expression of recombinant protein; (ii) to increase the solubility of the recombinant protein; and (iii) to aid in the purification of the recombinant protein by acting as a ligand in affinity purification. Often, in fusion expression vectors, a proteolytic cleavage site is introduced at the junction of the fusion moiety and the recombinant protein to enable separation of the recombinant protein from the fusion moiety subsequent to purification of the fusion protein. Such enzymes, and their cognate recognition sequences, include Factor Xa, thrombin, PreScission, TEV and enterokinase. Typical fusion expression vectors include pGEX (Pharmacia Biotech Inc; Smith and Johnson, 1988. Gene 67: 31-40), pMAL (New England Biolabs, Beverly, Mass.) and pRITS (Pharmacia, Piscataway, N.J.) that fuse glutathione S-transferase (GST), maltose E binding protein, or protein A, respectively, to the target recombinant protein.

[0133] Examples of suitable inducible non-fusion E. coli expression vectors include pTrc (Amrann et al., (1988) Gene 69:301-315) and pET 11d (Studier et al., Gene Expression Technology: Methods in Enzymology 185, Academic Press, San Diego, Calif. (1990) 60-89)—not accurate, pET 11a-d have N terminal T7 tag.

[0134] One strategy to maximize recombinant protein expression in E. coli is to express the protein in a host bacterium with an impaired capacity to proteolytically cleave the recombinant protein. See, e.g., Gottesman, Gene Expression Technology: Methods in Enzymology 185, Academic Press, San Diego, Calif (1990) 119-128. Another strategy is to alter the nucleic acid sequence of the nucleic acid to be inserted into an expression vector so that the individual codons for each amino acid are those preferentially utilized in E. coli (see, e.g., Wada, et al., 1992. Nucl. Acids Res. 20: 2111-2118). Such alteration of nucleic acid sequences of the disclosure can be carried out by standard DNA synthesis techniques. Another strategy to solve codon bias is by using BL21-codon plus bacterial strains (Invitrogen) or Rosetta bacterial strain (Novagen), these strains contain extra copies of rare E. coli tRNA genes.

[0135] In another embodiment, the expression vector encoding for the protein of the disclosure is a yeast expression vector. Examples of vectors for expression in yeast Saccharomyces cerevisiae include pYepSec1 (Baldari, et al., 1987. EMBO J. 6: 229-234), pMFa (Kurjan and Herskowitz, 1982. Cell 30: 933-943), pJRY88 (Schultz et al., 1987. Gene 54: 113-123), pYES2 (Invitrogen Corporation, San Diego, Calif.), and picZ (InVitrogen Corp, San Diego, Calif.).

[0136] Alternatively, polypeptides of the present disclosure can be produced in insect cells using baculovirus expression vectors. Baculovirus vectors available for expression of proteins in cultured insect cells (e.g., SF9 cells) include the pAc series (Smith, et al., 1983. Mol. Cell. Biol. 3: 2156-2165) and the pVL series (Lucklow and Summers, 1989. Virology 170: 31-39).

[0137] In yet another embodiment, a nucleic acid of the disclosure is expressed in mammalian cells using a mammalian expression vector. Mammalian cell lines available in the art for expression of a heterologous polypeptide include, but are not limited to, Chinese hamster ovary (CHO) cells, HeLa cells, baby hamster kidney cells, NSO mouse melanoma cells, YB2/0 rat myeloma cells, human embryonic kidney cells, human embryonic retina cells and many others. Examples of mammalian expression vectors include pCDM8 (Seed, 1987. Nature 329: 840) and pMT2PC (Kaufman, et al., 1987. EMBO J. 6: 187-195), pIRESpuro (Clontech), pUB6 (Invitrogen), pCEP4 (Invitrogen) pREP4 (Invitrogen), pcDNA3 (Invitrogen). When used in mammalian cells, the expression vector's control functions are often provided by viral regulatory elements. For example, commonly used promoters are derived from polyoma, adenovirus 2, cytomegalovirus, Rous Sarcoma Virus, and simian virus 40. For other suitable expression systems for both prokaryotic and eukaryotic cells see, e.g., Chapters 16 and 17 of Sambrook, et al., Molecular Cloning: A Laboratory Manual. 2nd ed., Cold Spring Harbor Laboratory, Cold Spring Harbor Laboratory Press, Cold Spring Harbor, N.Y., 1989.

[0138] In another embodiment, the recombinant mammalian expression vector is capable of directing expression of the nucleic acid preferentially in a particular cell type (e.g., tissue-specific regulatory elements are used to express the nucleic acid). Tissue-specific regulatory elements are known in the art. Non-limiting examples of suitable tissue-specific promoters include the albumin promoter (liver-specific; Pinkert, et al., 1987. Genes Dev. 1: 268-277), lymphoid-specific promoters (Calame and Eaton, 1988. Adv. Immunol. 43: 235-275), in particular promoters of T cell receptors (Winoto and Baltimore, 1989. EMBO J. 8: 729-733) and immunoglobulins (Banerji, et al., 1983. Cell 33: 729-740; Queen and Baltimore, 1983. Cell 33: 741-748), neuron-specific promoters (e.g., the neurofilament promoter; Byrne and Ruddle, 1989. Proc. Natl. Acad. Sci. USA 86: 5473-5477), pancreas-specific promoters (Edlund, et al., 1985. Science 230: 912-916), and mammary gland-specific promoters (e.g., milk whey promoter; U.S. Pat. No. 4,873,316 and European Application Publication No. 264,166). Developmentally-regulated promoters are also encompassed, e.g., the murinehox promoters (Kessel and Gruss, 1990. Science 249: 374-379) and the alpha-fetoprotein promoter (Campes and Tilghman, 1989. Genes Dev. 3: 537-546).

[0139] The disclosure should also be construed to include any form of a protein having substantial homology to a protein disclosed herein. In one embodiment, a protein which is “substantially homologous” is about 50% homologous, about 70% homologous, about 80% homologous, about 90% homologous, about 91% homologous, about 92% homologous, about 93% homologous, about 94% homologous, about 95% homologous, about 96% homologous, about 97% homologous, about 98% homologous, or about 99% homologous to amino acid sequence of a fusion-protein disclosed herein.

[0140] The protein may alternatively be made by recombinant means or by cleavage from a longer polypeptide. The composition of a protein may be confirmed by amino acid analysis or sequencing.

[0141] The variants of the protein according to the present disclosure may be (i) one in which one or more of the amino acid residues are substituted with a conserved or non-conserved amino acid residue and such substituted amino acid residue may or may not be one encoded by the genetic code, (ii) one in which there are one or more modified amino acid residues, e.g., residues that are modified by the attachment of substituent groups, (iii) one in which the peptide is an alternative splice variant of the protein of the present disclosure, (iv) fragments of the peptides and/or (v) one in which the protein is fused with another peptide, such as a leader or secretory sequence or a sequence which is employed for purification (for example, His-tag) or for detection (for example, Sv5 epitope tag). The fragments include peptides generated via proteolytic cleavage (including multi-site proteolysis) of an original sequence. Variants may be post-translationally, or chemically modified. Such variants are deemed to be within the scope of those skilled in the art from the teaching herein.

[0142] As known in the art the “similarity” between two fusion proteins is determined by comparing the amino acid sequence and its conserved amino acid substitutes of one polypeptide to a sequence of a second polypeptide. Variants are defined to include peptide sequences different from the original sequence. In one embodiment, variants are different from the original sequence in less than 40% of residues per segment of interest different from the original sequence in less than 25% of residues per segment of interest, different by less than 10% of residues per segment of interest, or different from the original protein sequence in just a few residues per segment of interest and at the same time sufficiently homologous to the original sequence to preserve the functionality of the original sequence and/or the ability to stimulate the differentiation of a stem cell into the osteoblast lineage. The present disclosure includes amino acid sequences that are at least 60%, 65%, 70%, 72%, 74%, 76%, 78%, 80%, 90%, 91%, 92%, 93%, 94%, 95%, 96%, 97%, 98%, or 99% similar or identical to the original amino acid sequence. The degree of identity between two peptides is determined using computer algorithms and methods that are widely known for the persons skilled in the art. The identity between two amino acid sequences may be determined by using the BLASTP algorithm [BLAST Manual, Altschul, S., et al., NCBI NLM NIH Bethesda, Md. 20894, Altschul, S., et al., J. Mol. Biol. 215: 403-410 (1990)].

[0143] The protein of the disclosure can be post-translationally modified. For example, post-translational modifications that fall within the scope of the present disclosure include signal peptide cleavage, glycosylation, acetylation, isoprenylation, proteolysis, myristoylation, protein folding and proteolytic processing, etc. Some modifications or processing events require introduction of additional biological machinery. For example, processing events, such as signal peptide cleavage and core glycosylation, are examined by adding canine microsomal membranes or Xenopus egg extracts (U.S. Pat. No. 6,103,489) to a standard translation reaction.

[0144] The protein of the disclosure may include unnatural amino acids formed by post-translational modification or by introducing unnatural amino acids during translation. A variety of approaches are available for introducing unnatural amino acids during protein translation.

[0145] A protein of the disclosure may be phosphorylated using conventional methods such as the method described in Reedijk et al. (The EMBO Journal 11(4):1365, 1992).

[0146] Cyclic derivatives of the fusion proteins of the disclosure are also part of the present disclosure. Cyclization may allow the protein to assume a more favorable conformation for association with other molecules. Cyclization may be achieved using techniques known in the art. For example, disulfide bonds may be formed between two appropriately spaced components having free sulfhydryl groups, or an amide bond may be formed between an amino group of one component and a carboxyl group of another component. Cyclization may also be achieved using an azobenzene-containing amino acid as described by Ulysse, L., et al., J. Am. Chem. Soc. 1995, 117, 8466-8467. The components that form the bonds may be side chains of amino acids, non-amino acid components or a combination of the two. In an embodiment of the disclosure, cyclic peptides may comprise a beta-turn in the right position. Beta-turns may be introduced into the peptides of the disclosure by adding the amino acids Pro-Gly at the right position.

[0147] It may be desirable to produce a cyclic protein which is more flexible than the cyclic peptides containing peptide bond linkages as described above. A more flexible peptide may be prepared by introducing cysteines at the right and left position of the peptide and forming a disulfide bridge between the two cysteines. The two cysteines are arranged so as not to deform the beta-sheet and turn. The peptide is more flexible as a result of the length of the disulfide linkage and the smaller number of hydrogen bonds in the beta-sheet portion. The relative flexibility of a cyclic peptide can be determined by molecular dynamics simulations.

[0148] The disclosure also relates to peptides comprising a fusion protein comprising Cas13 and a RNase protein, wherein the fusion protein is itself fused to, or integrated into, a target protein, and/or a targeting domain capable of directing the chimeric protein to a desired cellular component or cell type or tissue. The chimeric proteins may also contain additional amino acid sequences or domains. The chimeric proteins are recombinant in the sense that the various components are from different sources, and as such are not found together in nature (i.e., are heterologous).

[0149] In one embodiment, the targeting domain can be a membrane spanning domain, a membrane binding domain, or a sequence directing the protein to associate with for example vesicles or with the nucleus. In one embodiment, the targeting domain can target a peptide to a particular cell type or tissue. For example, the targeting domain can be a cell surface ligand or an antibody against cell surface antigens of a target tissue. A targeting domain may target the peptide of the disclosure to a cellular component.

[0150] A peptide of the disclosure may be synthesized by conventional techniques. For example, the peptides or chimeric proteins may be synthesized by chemical synthesis using solid phase peptide synthesis. These methods employ either solid or solution phase synthesis methods (see for example, J. M. Stewart, and J. D. Young, Solid Phase Peptide Synthesis, 2^{nd} Ed., Pierce Chemical Co., Rockford Ill. (1984) and G. Barany and R. B. Merrifield, The Peptides: Analysis Synthesis, Biology editors E. Gross and J. Meienhofer Vol. 2 Academic Press, New York, 1980, pp. 3-254 for solid phase synthesis techniques; and M Bodansky, Principles of Peptide Synthesis, Springer-Verlag, Berlin 1984, and E. Gross and J. Meienhofer, Eds., The Peptides: Analysis, Synthesis, Biology, suprs, Vol 1, for classical solution synthesis). By way of example, a peptide of the disclosure may be synthesized using 9-fluorenyl methoxycarbonyl (Fmoc) solid phase chemistry with direct incorporation of phosphothreonine as the N-fluorenylmethoxy-carbonyl-O-benzyl-L-phosphothreonine derivative.

[0151] N-terminal or C-terminal fusion proteins comprising a peptide or chimeric protein of the disclosure conjugated with other molecules may be prepared by fusing, through recombinant techniques, the N-terminal or C-terminal of the peptide or chimeric protein, and the sequence of a selected protein or selectable marker with a desired biological function. The resultant fusion proteins contain the protein fused to the selected protein or marker protein as described herein. Examples of proteins which may be used to prepare fusion proteins include immunoglobulins, glutathione-S-transferase (GST), hemagglutinin (HA), and truncated myc.

[0152] Peptides of the disclosure may be developed using a biological expression system. The use of these systems allows the production of large libraries of random peptide sequences and the screening of these libraries for peptide sequences that bind to particular proteins. Libraries may be produced by cloning synthetic DNA that encodes random peptide sequences into appropriate expression vectors (see Christian et al 1992, J. Mol. Biol. 227:711; Devlin et al, 1990 Science 249:404; Cwirla et al 1990, Proc. Natl. Acad, Sci. USA, 87:6378). Libraries may also be constructed by concurrent synthesis of overlapping peptides (see U.S. Pat. No. 4,708,871).

[0153] The peptides and chimeric proteins of the disclosure may be converted into pharmaceutical salts by reacting with inorganic acids such as hydrochloric acid, sulfuric acid, hydrobromic acid, phosphoric acid, etc., or organic acids such as formic acid, acetic acid, propionic acid, glycolic acid, lactic acid, pyruvic acid, oxalic acid, succinic acid, malic acid, tartaric acid, citric acid, benzoic acid, salicylic acid, benezenesulfonic acid, and toluenesulfonic acids.

### Nucleic Acids

[0154] In one embodiment, the present disclosure a nucleic acid molecule encoding a fusion protein of the disclosure. In one embodiment, the nucleic acid encodes a fusion protein comprising a nuclear localization signal (NLS). In on embodiment, the nucleic acid encodes a fusion protein comprising an editing protein and an integrase protein. In one embodiment, the nucleic acid encodes a fusion protein comprising a purification and/or detection tag.

[0155] The present disclosure also provides targeting nucleic acids, including guide RNAs (gRNAs), for targeting the protein of the disclosure to a target nucleic acid sequence.

### Editing Proteins

[0156] In one embodiment, the nucleic acid molecule comprises a sequence nucleic acid encoding an editing protein. In one embodiment, the editing protein includes, but is not limited to, a CRISPR-associated (Cas) protein, a zinc finger nuclease (ZFN) protein, and a protein having a DNA or RNA binding domain.

[0157] Non-limiting examples of Cas proteins include Cas1, Cas1B, Cas2, Cas3, Cas4, Cas5, Cas6, Cas7, Cas8, Cas9, Cas10, Cas14, Csy1, Csy2, Csy3, Cse1, Cse2, Csc1, Csc2, Csa5, Csn2. Csm2, Csm3, Csm4, Csm5, Csm6, Cmr1, Cmr3, Cmr4, Cmr5, Cmr6, Csb1, Csb2, Csb3, Csx17, Csx14, Csx10, Csx16, CsaX, Csx3, Csx1, Csx15, Csf1, Csf2, Csf3, Csf4, SpCas9, StCas9, NmCas9, SaCas9, CjCas9, CjCas9, AsCpf1, LbCpf1, FnCpf1, VRER SpCas9, VQR SpCas9, xCas9 3.7, homologs thereof, orthologs thereof, or modified versions thereof. In some embodiments, the Cas protein has DNA cleavage activity. In some embodiments, the Cas protein directs cleavage of one or both strands of a nucleic acid molecule at the location of a target sequence, such as within the target sequence and/or within the complement of the target sequence. In some embodiments, the Cas protein directs cleavage of one or both strands within about 1, 2, 3, 4, 5, 6, 7, 8, 9, 10, 15, 20, 25, 50, 100, 200, 500, or more base pairs from the first or last nucleotide of a target sequence. In one embodiment, the Cas protein is Cas9 or Cas14. In one embodiment, Cas protein is Cas9. In one embodiment, Cas protein is Cas14. In one embodiment, Cas protein is catalytically deficient (dCas).

[0158] In one embodiment, the nucleic acid sequence encoding a Cas protein comprises a nucleic acid sequence encoding an amino acid sequence at least 70%, at least 71%, at least 72%, at least 73%, at least 74%, at least 75%, at least 76%, at least 77%, at least 78%, at least 79%, at least 80%, at least 81%, at least 82%, at least 83%, at least 84%, at least 85%, at least 86%, at least 87%, at least 88%, at least 89%, at least 90%, at least 91%, at least 92%, at least 93%, at least 94%, at least 95%, at least 96%, at least 97%, at least 98%, or at least 99% identical to one of SEQ ID NOs:1-8. In one embodiment, the nucleic acid sequence encoding a Cas protein comprises a nucleic acid sequence encoding an amino acid sequence of one of SEQ ID NOs: 1-8. In one embodiment, the nucleic acid sequence encoding a Cas protein comprises a nucleic acid sequence encoding an amino acid sequence of one of SEQ ID NOs: 1, 3, 5, or 7. In one embodiment, the nucleic acid sequence encoding a Cas protein comprises a nucleic acid sequence encoding an amino acid sequence of one of SEQ ID NOs: 2, 4, 6, or 8. In one embodiment, the nucleic acid sequence encoding a Cas protein comprises a nucleic acid sequence encoding an amino acid sequence of one of SEQ ID NOs: 1-2. In one embodiment, the nucleic acid sequence encoding a Cas protein comprises a nucleic acid sequence encoding an amino acid sequence of one of SEQ ID NOs: 7-8.

[0159] In one embodiment, the nucleic acid sequence encoding a Cas protein comprises a nucleic acid sequence at least 70%, at least 71%, at least 72%, at least 73%, at least 74%, at least 75%, at least 76%, at least 77%, at least 78%, at least 79%, at least 80%, at least 81%, at least 82%, at least 83%, at least 84%, at least 85%, at least 86%, at least 87%, at least 88%, at least 89%, at least 90%, at least 91%, at least 92%, at least 93%, at least 94%, at least 95%, at least 96%, at least 97%, at least 98%, or at least 99% identical to one of SEQ ID NOs: 153-160. In one embodiment, the nucleic acid sequence encoding a Cas protein comprises a nucleic acid sequence of one of SEQ ID NOs: 153-160. In one embodiment, the nucleic acid sequence encoding a Cas protein comprises a nucleic acid sequence of one of SEQ ID NOs: 153, 155, 157, or 159. In one embodiment, the nucleic acid sequence encoding a Cas protein comprises a nucleic acid sequence of one of SEQ ID NOs: 154, 156, 158, or 160. In one embodiment, the nucleic acid sequence encoding a Cas protein comprises a nucleic acid sequence of one of SEQ ID NOs: 153-154. In one embodiment, the nucleic acid sequence encoding a Cas protein comprises a nucleic acid sequence of one of SEQ ID NOs: 159-160.

### Nuclear Localization Signal

[0160] In some embodiments, the nucleic acid molecule comprises a nucleic acid sequence encoding a nuclear localization signal (NLS). In one embodiment, the protein comprises a NLS. In one embodiment, the NLS is a retrotransposon NLS. In one embodiment, the NLS is derived from Ty1, yeast GAL4, SKI3, L29 or histone H2B proteins, polyoma virus large T protein, VP1 or VP2 capsid protein, SV40 VP1 or VP2 capsid protein, Adenovirus Ela or DBP protein, influenza virus NS1 protein, hepatitis vims core antigen or the mammalian lamin, c-myc, max, c-myb, p53, c-erbA, jun, Tax, steroid receptor or Mx proteins, Nucleoplasmin (NPM2), Nucleophosmin (NPM1), or simian vims 40 (“SV40”) T-antigen. In one embodiment, the NLS is a Ty1 or Ty1-derived NLS, a Ty2 or Ty2-derived NLS or a MAK11 or MAK11-derived NLS.

[0161] In one embodiment, the Ty1 NLS comprises an amino acid sequence of SEQ ID NO:53. In one embodiment, the Ty2 NLS comprises an amino acid sequence of SEQ ID NO:54. In one embodiment, the MAK11 NLS comprises an amino acid sequence of SEQ ID NO: 56. In one embodiment, the nucleic acid sequence encoding a NLS encodes an amino acid sequence at least 70%, at least 71%, at least 72%, at least 73%, at least 74%, at least 75%, at least 76%, at least 77%, at least 78%, at least 79%, at least 80%, at least 81%, at least 82%, at least 83%, at least 84%, at least 85%, at least 86%, at least 87%, at least 88%, at least 89%, at least 90%, at least 91%, at least 92%, at least 93%, at least 94%, at least 95%, at least 96%, at least 97%, at least 98%, or at least 99% identical to one of SEQ ID NOs: 49-62 and 361-973. In one embodiment, the nucleic acid sequence encoding a NLS encodes an amino acid sequence of one of SEQ ID NOs: 49-62 and 361-973.

[0162] In one embodiment, the nucleic acid sequence encoding a NLS comprises a sequence at least 70%, at least 71%, at least 72%, at least 73%, at least 74%, at least 75%, at least 76%, at least 77%, at least 78%, at least 79%, at least 80%, at least 81%, at least 82%, at least 83%, at least 84%, at least 85%, at least 86%, at least 87%, at least 88%, at least 89%, at least 90%, at least 91%, at least 92%, at least 93%, at least 94%, at least 95%, at least 96%, at least 97%, at least 98%, or at least 99% identical to one of SEQ ID NOs: 201-210. In one embodiment, the nucleic acid sequence encoding a NLS comprises a sequence of one of SEQ ID NOs: 201-210.

[0163] In one embodiment, the NLS is a Ty1-like NLS. For example, in one embodiment, the Ty1-like NLS comprises KKRX motif. In one embodiment, the Ty1-like NLS comprises KKRX motif at the N-terminal end. In one embodiment, the Ty1-like NLS comprises KKR motif. In one embodiment, the Ty1-like NLS comprises KKR motif at the C-terminal end. In one embodiment, the Ty1-like NLS comprises a KKRX and a KKR motif. In one embodiment, the Ty1-like NLS comprises a KKRX at the N-terminal end and a KKR motif at the C-terminal end. In one embodiment, the Ty1-like NLS comprises at least 20 amino acids. In one embodiment, the Ty1-like NLS comprises between 20 and 40 amino acids. In one embodiment, the nucleic acid sequence encoding a Ty1-like NLS encodes an amino acid sequence at least 70%, at least 71%, at least 72%, at least 73%, at least 74%, at least 75%, at least 76%, at least 77%, at least 78%, at least 79%, at least 80%, at least 81%, at least 82%, at least 83%, at least 84%, at least 85%, at least 86%, at least 87%, at least 88%, at least 89%, at least 90%, at least 91%, at least 92%, at least 93%, at least 94%, at least 95%, at least 96%, at least 97%, at least 98%, or at least 99% identical to one of SEQ ID NOs: 361-973. In one embodiment, the nucleic acid sequence encoding a Ty1-like NLS encodes an amino acid of one of SEQ ID NOs: 361-973, wherein the sequence comprises one or more, two or more, three or more, four or more, five or more, six or more, seven or more, eight or more, nine or more, or ten or more, insertions, deletions or substitutions. In one embodiment, In one embodiment, the nucleic acid sequence encoding a Ty1-like NLS encodes an amino acid sequence of one of SEQ ID NOs: 361-973.

[0164] In some embodiments, the nucleic acid molecule comprises one or more nucleic acid sequences encoding a combination of two distinct NLS.

[0165] For example, in one embodiment, the nucleic acid molecule comprises one or more nucleic acid sequences encoding a Ty1-derived NLS and a SV40-derived NLS. In one embodiment, the nucleic acid molecule comprises one or more nucleic acid sequences encoding two or more of a Ty1 or Ty1-derived NLS, a Ty2 or Ty2-derived NLS or a MAK11 or MAK11-derived NLS. In one embodiment, nucleic acid molecule comprises one or more nucleic acid sequences encoding a Ty1 NLS comprising an amino acid sequence of SEQ ID NO:53. In one embodiment, nucleic acid molecule comprises one or more nucleic acid sequences encoding a Ty2 NLS comprising an amino acid sequence of SEQ ID NO:54. In one embodiment, nucleic acid molecule comprises one or more nucleic acid sequences encoding a MAK11 NLS comprising an amino acid sequence of SEQ ID NO:56.

[0166] In one embodiment, the nucleic acid molecule comprises one or more nucleic acid sequences encoding a two copies of the same NLS. For example, in one embodiment, the nucleic acid molecule comprises one or more nucleic acid sequences each encoding a NLS comprising a multimer of a first Ty1-derived NLS and a second Ty1-derived NLS.

[0167] In one embodiment, the nucleic acid molecule comprises a nucleic acid sequence encoding a first NLS sequence and a nucleic acid sequences encoding a second NLS sequence. In one embodiment, the first NLS sequence is at least 70%, at least 71%, at least 72%, at least 73%, at least 74%, at least 75%, at least 76%, at least 77%, at least 78%, at least 79%, 80%, at least 81%, at least 82%, at least 83%, at least 84%, at least 85%, at least 86%, at least 87%, at least 88%, at least 89%, 90%, at least 91%, at least 92%, at least 93%, at least 94%, at least 95%, at least 96%, at least 97%, at least 98%, or at least 99% to one of SEQ ID NOs:47-56, 254-257, and 275-887. In one embodiment, the second NLS sequence is at least 70%, at least 71%, at least 72%, at least 73%, at least 74%, at least 75%, at least 76%, at least 77%, at least 78%, at least 79%, 80%, at least 81%, at least 82%, at least 83%, at least 84%, at least 85%, at least 86%, at least 87%, at least 88%, at least 89%, 90%, at least 91%, at least 92%, at least 93%, at least 94%, at least 95%, at least 96%, at least 97%, at least 98%, or at least 99% to one of SEQ ID NOs: 49-62 and 361-973. In one embodiment, the first NLS sequence and second NLS sequence are the same. In one embodiment, the first NLS sequence and second NLS sequence are different.

### Retroviral Integrase

[0168] In some embodiments, the nucleic acid molecule comprises a nucleic acid sequence encoding a retroviral integrase (IN). In one embodiment, the retroviral IN is human immunodeficiency virus (HIV) IN, Rous sarcoma virus (RSV) IN, Mouse mammary tumor virus (MMTV) IN, Moloney murine leukemia virus (MoLV) IN, bovine leukemia virus (BLV) IN, Human T-lymphotropic virus (HTLV) IN, avian sarcoma leukosis virus (ASLV) IN, feline leukemia virus (FLV) IN, xenotropic murine leukemia virus-related virus (XMLV) IN, simian immunodeficiency virus (SIV) IN, feline immunodeficiency virus (FIV) IN, equine infectious anemia virus (EIAV) IN, Prototype foamy virus (PFV) IN, simian foamy virus (SFV) IN, human foamy virus (HFV) IN, walleye dermal sarcoma virus (WDSV) IN, or bovine immunodeficiency virus (BIV) IN. In one embodiment, the integrase is a retrotransposon integrase. In one embodiment, the retrotransposon integrase is Ty1, or Ty2. In one embodiment, the integrase is a bacterial integrase. In one embodiment, the bacterial integrase is insF.

[0169] In one embodiment, the retroviral IN is HIV IN. In one embodiment, the HIV IN comprises one or more amino acid substitutions, wherein the substitution improves catalytic activity, improves solubility, or increases interaction with one or more host cellular cofactors. In one embodiment, HIV IN comprises one or more, two or more, three or more, four or more, five or more, six or more, seven or more, eight or more or nine amino acid substitutions selected from the group consisting of E85G, E85F, D116N, F185K, C280S, T97A, Y134R, G140S, and Q148H. In one embodiment, HIV IN comprises amino acid substitutions F185K and C280S. In one embodiment, HIV IN comprises amino acid substitutions T97A and Y134R. In one embodiment, HIV IN comprises amino acid substitutions G140S and Q148H.

[0170] In one embodiment, the retroviral IN fragment comprises the IN N-terminal domain (NTD), and the IN catalytic core domain (CCD). In one embodiment, the retroviral IN fragment comprises the IN CCD and the IN C-terminal domain (CTD). In one embodiment, the retroviral IN fragment comprises the IN NTD. In one embodiment, the retroviral IN fragment comprises the IN CCD. In one embodiment, the retroviral IN fragment comprises the IN CTD. The in one embodiment, the fragments of the integrase retain at least one activity of the full length integrase. Retroviral integrase functions and fragments are known in the art and can be found in, for example, Li, et al., 2011, Virology 411:194-205, and Maertens et al., 2010, Nature 468:326-29, which are incorporated by reference herein.

[0171] In one embodiment, the nucleic acid sequence encoding a retroviral IN comprises a nucleic acid sequence encoding an amino acid sequence at least 70%, at least 71%, at least 72%, at least 73%, at least 74%, at least 75%, at least 76%, at least 77%, at least 78%, at least 79%, at least 80%, at least 81%, at least 82%, at least 83%, at least 84%, at least 85%, at least 86%, at least 87%, at least 88%, at least 89%, at least 90%, at least 91%, at least 92%, at least 93%, at least 94%, at least 95%, at least 96%, at least 97%, at least 98%, or at least 99% identical to one of SEQ ID NOs: 9-48. In one embodiment, the nucleic acid sequence encoding a retroviral IN comprises a nucleic acid sequence encoding an amino acid sequence of one of SEQ ID NOs: 9-48.

[0172] In one embodiment, the nucleic acid sequence encoding a retroviral IN comprises a nucleic acid sequence at least 70%, at least 71%, at least 72%, at least 73%, at least 74%, at least 75%, at least 76%, at least 77%, at least 78%, at least 79%, at least 80%, at least 81%, at least 82%, at least 83%, at least 84%, at least 85%, at least 86%, at least 87%, at least 88%, at least 89%, at least 90%, at least 91%, at least 92%, at least 93%, at least 94%, at least 95%, at least 96%, at least 97%, at least 98%, or at least 99% identical to one of SEQ ID NOs: 161-200. In one embodiment, the nucleic acid sequence encoding a retroviral IN comprises a nucleic acid sequence of one of SEQ ID NOs: 161-200.

Purification and/or Detection Tag

[0173] In some embodiments, the nucleic acid molecule comprises a nucleic acid sequence encoding a purification and/or detection tag. In one embodiment, the tag is on the N-terminal end of the protein. In one embodiment, the tag is a 3×FLAG tag.

[0174] In one embodiment, the nucleic acid sequence encoding a purification and/or detection tag encodes an amino acid sequence at least 70%, at least 71%, at least 72%, at least 73%, at least 74%, at least 75%, at least 76%, at least 77%, at least 78%, at least 79%, at least 80%, at least 81%, at least 82%, at least 83%, at least 84%, at least 85%, at least 86%, at least 87%, at least 88%, at least 89%, at least 90%, at least 91%, at least 92%, at least 93%, at least 94%, at least 95%, at least 96%, at least 97%, at least 98%, or at least 99% identical to SEQ ID NO:51. In one embodiment, the nucleic acid sequence encoding a purification and/or detection tag encodes an amino acid sequence of SEQ ID NO:51.

[0175] In one embodiment, the nucleic acid sequence encoding a purification and/or detection tag comprises a sequence at least 70%, at least 71%, at least 72%, at least 73%, at least 74%, at least 75%, at least 76%, at least 77%, at least 78%, at least 79%, at least 80%, at least 81%, at least 82%, at least 83%, at least 84%, at least 85%, at least 86%, at least 87%, at least 88%, at least 89%, at least 90%, at least 91%, at least 92%, at least 93%, at least 94%, at least 95%, at least 96%, at least 97%, at least 98%, or at least 99% identical to SEQ ID NO:203. In one embodiment, the nucleic acid sequence encoding a purification and/or detection tag comprises a sequence of SEQ ID NO:203.

### Fusion Proteins

[0176] In one aspect, the present disclosure provides nucleic acid molecules comprising a nucleic acid sequence encoding fusion proteins comprising a Cas protein and a nuclear localization signal (NLS) described herein. In In one embodiment, the nucleic acid sequence encoding a fusion protein encodes an amino acid sequence 70%, at least 71%, at least 72%, at least 73%, at least 74%, at least 75%, at least 76%, at least 77%, at least 78%, at least 79%, at least 80%, at least 81%, at least 82%, at least 83%, at least 84%, at least 85%, at least 86%, at least 87%, at least 88%, at least 89%, at least 90%, at least 91%, at least 92%, at least 93%, at least 94%, at least 95%, at least 96%, at least 97%, at least 98%, or at least 99% identical to one of SEQ ID NOs147-149. In one embodiment, the nucleic acid sequence encoding a fusion protein encodes an amino acid sequence of one of SEQ ID NOs: 147-149. In one embodiment, the nucleic acid sequence encoding a fusion protein encodes an amino acid sequence of SEQ ID NO: 149.

[0177] In one embodiment, the nucleic acid sequence encoding a fusion protein comprises a sequence at least 70%, at least 71%, at least 72%, at least 73%, at least 74%, at least 75%, at least 76%, at least 77%, at least 78%, at least 79%, at least 80%, at least 81%, at least 82%, at least 83%, at least 84%, at least 85%, at least 86%, at least 87%, at least 88%, at least 89%, at least 90%, at least 91%, at least 92%, at least 93%, at least 94%, at least 95%, at least 96%, at least 97%, at least 98%, or at least 99% identical to SEQ ID NO:255-257. In one embodiment, the nucleic acid sequence encoding a fusion protein comprises a sequence of one of SEQ ID NOs:255-257. In one embodiment, the nucleic acid sequence encoding a fusion protein comprises a sequence of SEQ ID NOs:257.

[0178] In one aspect, the present disclosure provides nucleic acid molecules comprising a nucleic acid sequence encoding fusion proteins comprising a Cas protein, a nuclear localization signal (NLS), and a retroviral IN or a fragment or variant thereof described herein. In one embodiment, the nucleic acid sequence encoding a fusion protein encodes an amino acid sequence 70%, at least 71%, at least 72%, at least 73%, at least 74%, at least 75%, at least 76%, at least 77%, at least 78%, at least 79%, at least 80%, at least 81%, at least 82%, at least 83%, at least 84%, at least 85%, at least 86%, at least 87%, at least 88%, at least 89%, at least 90%, at least 91%, at least 92%, at least 93%, at least 94%, at least 95%, at least 96%, at least 97%, at least 98%, or at least 99% identical to one of SEQ ID NOs:63-142. In one embodiment, the nucleic acid sequence encoding a fusion protein encodes an amino acid sequence of one of SEQ ID NOs: 63-142.

[0179] In one embodiment, the nucleic acid sequence encoding fusion protein comprises a sequence at least 70%, at least 71%, at least 72%, at least 73%, at least 74%, at least 75%, at least 76%, at least 77%, at least 78%, at least 79%, at least 80%, at least 81%, at least 82%, at least 83%, at least 84%, at least 85%, at least 86%, at least 87%, at least 88%, at least 89%, at least 90%, at least 91%, at least 92%, at least 93%, at least 94%, at least 95%, at least 96%, at least 97%, at least 98%, or at least 99% identical to SEQ ID NOs:211-250. In one embodiment, the nucleic acid sequence encoding a fusion protein comprises a sequence of SEQ ID NOs: 211-250.

[0180] In one embodiment the fusion protein further comprise a purification and/or detection tag. In one embodiment, the nucleic acid sequence encoding a fusion protein encodes an amino acid sequence at least 70%, at least 71%, at least 72%, at least 73%, at least 74%, at least 75%, at least 76%, at least 77%, at least 78%, at least 79%, 80%, at least 81%, at least 82%, at least 83%, at least 84%, at least 85%, at least 86%, at least 87%, at least 88%, at least 89%, 90%, at least 91%, at least 92%, at least 93%, at least 94%, at least 95%, at least 96%, at least 97%, at least 98%, or at least 99% identical to one of SEQ ID NOs:143-146. In one embodiment, the nucleic acid sequence encoding a fusion protein encodes an amino acid sequence of one of SEQ ID NOs: 143-146.

[0181] In one embodiment, the nucleic acid sequence comprises a sequence at least 70%, at least 71%, at least 72%, at least 73%, at least 74%, at least 75%, at least 76%, at least 77%, at least 78%, at least 79%, 80%, at least 81%, at least 82%, at least 83%, at least 84%, at least 85%, at least 86%, at least 87%, at least 88%, at least 89%, 90%, at least 91%, at least 92%, at least 93%, at least 94%, at least 95%, at least 96%, at least 97%, at least 98%, or at least 99% identical to one of SEQ ID NOs:251-254. In one embodiment, the nucleic acid sequence comprises a sequence of one of SEQ ID NOs: 251-254.

### Guide Nucleic Acids

[0182] In one aspect, the disclosure provides guide nucleic acids for targeting Cas to a target nucleic acid. In one embodiment, the disclosure provides tracrRNAs and CRISPR RNAs (cRNAs). In one embodiment, a tracrRNA and cRNAs are fused to form a single guide RNA (sgRNA). The crRNA, or crRNA portion of the gRNA duplex comprises the DNA-targeting segment of the gRNA. The tracrRNA, or tracrRNA portion of the gRNA, comprises a segment that interacts with the Cas protein. In one embodiment, the crRNA, or crRNA portion of the gRNA, comprises a tracr mate sequence that hybridizes to a portion of the tracrRNA and a spacer sequence that is substantially complementarity to a target sequence such that it hybridizes to the target sequence.

[0183] As used herein, a “target sequence” refers to a sequence to which a guide sequence is designed to have complementarity, where hybridization between a target sequence and a guide sequence promotes the formation of a CRISPR complex. Full complementarity is not necessarily required, provided there is sufficient complementarity to cause hybridization and promote formation of a CRISPR complex. A target sequence may comprise any polynucleotide, such as DNA or RNA polynucleotides. In some embodiments, a target sequence is located in the nucleus or cytoplasm of a cell. In some embodiments, the target sequence may be within an organelle of a eukaryotic cell, for example, mitochondrion or chloroplast. A sequence or template that may be used for recombination into the targeted locus comprising the target sequences is referred to as an “editing template” or “editing polynucleotide” or “editing sequence”. In aspects of the disclosure, an exogenous template polynucleotide may be referred to as an editing template. In an aspect of the disclosure the recombination is homologous recombination.

[0184] The “tracrRNA” sequence or analogous terms includes any polynucleotide sequence that has sufficient complementarity with a crRNA sequence to hybridize. In some forms, the degree of complementarity between the tracrRNA sequence and crRNA sequence along the length of the shorter of the two when optimally aligned is about or more than about 25%, 30%, 40%, 50%, 60%, 70%, 80%, 90%, 95%, 97.5%, 99%, or higher. In some forms, the tracr sequence is about or more than about 5, 6, 7, 8, 9, 10, 11, 12, 13, 14, 15, 16, 17, 18, 19, 20, 25, 30, 40, 50, or more nucleotides in length. In some forms, the tracr sequence and crRNA sequence are contained within a single transcript, such that hybridization between the two produces a transcript having a secondary structure, such as a hairpin. In some forms, the transcript or transcribed polynucleotide sequence has at least two or more hairpins. In preferred forms, the transcript has two, three, four or five hairpins. In some forms, the transcript has at most five hairpins. In a hairpin structure the portion of the sequence 5′ of the final “N” and upstream of the loop corresponds to the tracr mate sequence, and the portion of the sequence 3′ of the loop corresponds to the tracr sequence.

[0185] In general, degree of complementarity is with reference to the optimal alignment of the sea sequence and tracr sequence, along the length of the shorter of the two sequences. Optimal alignment may be determined by any suitable alignment algorithm, and may further account for secondary structures, such as self-complementarity within either the sea sequence or tracr sequence. In some forms, the degree of complementarity between the tracr sequence and sea sequence along the length of the shorter of the two when optimally aligned is about or more than about 25%, 30%, 40%, 50%, 60%, 70%, 80%, 90%, 95%, 97.5%, 99%, or higher.

[0186] A guide sequence may be selected to target any target sequence. In some embodiments, the target sequence is a sequence within a genome of a cell. Exemplary target sequences include those that are unique in the target genome. For example, for the S. pyogenes Cas9, a unique target sequence in a genome may include a Cas9 target site of the form MMMMMMMMNNNNNNNNNNNNXGG where NNNNNNNNNNNNXGG (N is A, G, T, or C; and X can be anything) has a single occurrence in the genome. A unique target sequence in a genome may include an S. pyogenes Cas9 target site of the form MMMMMMMMMNNNNNNNNNNNXGG where NNNNNNNNNNNXGG (N is A, G, T, or C; and X can be anything) has a single occurrence in the genome. For the S. thermophilus CRISPRI Cas9, a unique target sequence in a genome may include a Cas9 target site of the form MMMMMMMMNNNNNNNNNNNNXXAGAAW where NNNNNNNNNNNNXXAGAAW (N is A, G, T, or C; X can be anything; and W is A or T) has a single occurrence in the genome. A unique target sequence in a genome may include an S. thermophilus CRISPRI Cas9 target site of the form MMMMMMMMMNNNNNNNNNNNXXAGAAW where NNNNNNNNNNNXXAGAAW (N is A, G, T, or C; X can be anything; and W is A or T) has a single occurrence in the genome. For the S. pyogenes Cas9, a unique target sequence in a genome may include a Cas9 target site of the form NMMMMMMMNNNNNNNNNNNNXGGXG where NNNNNNNNNNNNXGGXG (N is A, G, T, or C; and X can be anything) has a single occurrence in the genome. A unique target sequence in a genome may include an S. pyogenes Cas9 target site of the form MMMMMMMMMNNNNNNNNNNNXGGXG where NNNNNNNNNNNXGGXG (N is A, G, T, or C; and X can be anything) has a single occurrence in the genome. In each of these sequences “M” may be A, G, T, or C, and need not be considered in identifying a sequence as unique.

[0187] In some embodiments, a guide sequence is selected to reduce the degree of secondary structure within the guide sequence. Secondary structure may be determined by any suitable polynucleotide folding algorithm. Some programs are based on calculating the minimal Gibbs free energy. An example of one such algorithm is mFold, as described by Zuker and Stiegler (Nucleic Acids Res. 9 (1981), 133-148). Another example folding algorithm is the online webserver RNAfold, developed at Institute for Theoretical Chemistry at the University of Vienna, using the centroid structure prediction algorithm (see e.g. A. R. Gruber et al., 2008, Cell 106(1): 23-24; and PA Carr and GM Church, 2009, Nature Biotechnology 27(12): 1151-62).

[0188] In general, a tracr mate sequence includes any sequence that has sufficient complementarity with a tracr sequence to promote one or more of: (1) excision of a guide sequence flanked by tracr mate sequences in a cell containing the corresponding tracr sequence; and (2) formation of a CRISPR complex at a target sequence, wherein the CRISPR complex comprises the tracr mate sequence hybridized to the tracr sequence. In general, degree of complementarity is with reference to the optimal alignment of the tracr mate sequence and tracr sequence, along the length of the shorter of the two sequences. Optimal alignment may be determined by any suitable alignment algorithm, and may further account for secondary structures, such as self-complementarity within either the tracr sequence or tracr mate sequence. In some embodiments, the degree of complementarity between the tracr sequence and tracr mate sequence along the length of the shorter of the two when optimally aligned is about or more than about 25%, 30%, 40%, 50%, 60%, 70%, 80%, 90%, 95%, 97.5%, 99%, or higher. In some embodiments, the tracr sequence is about or more than about 5, 6, 7, 8, 9, 10, 11, 12, 13, 14, 15, 16, 17, 18, 19, 20, 25, 30, 40, 50, or more nucleotides in length. In some embodiments, the tracr sequence and tracr mate sequence are contained within a single transcript, such that hybridization between the two produces a transcript having a secondary structure, such as a hairpin. In one embodiment, loop forming sequences for use in hairpin structures are four nucleotides in length. In one embodiment, loop forming sequences for use in hairpin structures have the sequence GAAA. However, longer or shorter loop sequences may be used, as may alternative sequences. The sequences may include a nucleotide triplet (for example, AAA), and an additional nucleotide (for example C or G). Examples of loop forming sequences include CAAA and AAAG. In an embodiment of the disclosure, the transcript or transcribed polynucleotide sequence has at least two or more hairpins. In some embodiments, the transcript has two, three, four or five hairpins. In a further embodiment of the disclosure, the transcript has at most five hairpins. In some embodiments, the single transcript further includes a transcription termination sequence; in some embodiments this is a polyT sequence, for example six T nucleotides.

[0189] In one embodiment, the Cas14 tracr sequence comprises a sequence at least 90% homologous to SEQ ID NO:336. In one embodiment, the Cas14 tracr comprises a stretch of consecutive stretch of 5 T's, which functions as a termination sequence recognized by Pol III promoters, and therefore may prevent guide RNA expression in mammalian cells. Therefore, in some embodiments, the Cas14 tracr sequence comprise a single mutation in the poly T sequence. For example, in one embodiment, the Cas 14 tracr comprises a sequence at least 90% homologous to SEQ ID NOs:337-339. In one embodiment, the Cas 14 tracr comprises a sequence of one of SEQ ID NOs: 337-339.

[0190] In one embodiment, the Cas 14 crRNA comprises a tracr mate sequence. In one embodiment, the tracr mate sequence comprise a sequence at least 90% homologous to one of SEQ ID NOs:340-343. In one embodiment, the tracr mate sequence comprise a sequence of one of SEQ ID NOs:340-343. In one embodiment, the Cas 14 crRNA comprises a tracr mate sequence and a spacer sequence. In one embodiment, the Cas14 crRNA comprise a tracr mate sequence at least 90% homologous to one of SEQ ID NOs:340-343 and a spacer sequence, wherein the spacer sequence substantially hydrides to a target. In one embodiment, the Cas14 crRNA comprise a tracr mate sequence of one of SEQ ID NOs:340-343 and a spacer sequence, wherein the spacer sequence substantially hydrides to a target.

[0191] In one embodiment, the Cas14 sgRNA comprises a tracr sequence that is joined to the tracr mate sequence of the crRNA via a loop forming sequence. In one embodiment, the sgRNA comprise a sequence at least 90% homologous to one of SEQ ID NOs:344-349. In one embodiment, the sgRNA comprise a sequence of one of SEQ ID NOs:344-349. In one embodiment, the sgRNA comprise a sequence at least 90% homologous to one of SEQ ID NOs:344-349 and further comprise a spacer sequence. In one embodiment, the sgRNA comprise a sequence of one of SEQ ID NOs:344-349 and further comprise a spacer sequence.

[0192] In one embodiment, the Cas14 sgRNA comprises a sequence at least 90% homologous to SEQ ID NOs:350-355. In one embodiment, the Cas14 sgRNA comprises a sequence of one of SEQ ID NOs:350-355.

### Ef1a2 Promotors

[0193] In one aspect, the nucleic acid molecules of the disclosure comprise a Ef1a2 promotor to drive the expression of a protein or gene described herein. In one embodiment, the promotor is Ef1a2 promotor is capable of driving expression in heart, skeletal muscle and neural tissues, such as brain and motor neurons. In one embodiment, the Ef1a2 promotor comprises a sequence at least 70%, at least 71%, at least 72%, at least 73%, at least 74%, at least 75%, at least 76%, at least 77%, at least 78%, at least 79%, 80%, at least 81%, at least 82%, at least 83%, at least 84%, at least 85%, at least 86%, at least 87%, at least 88%, at least 89%, 90%, at least 91%, at least 92%, at least 93%, at least 94%, at least 95%, at least 96%, at least 97%, at least 98%, or at least 99% identical to one of SEQ ID NOs:333-335. In one embodiment, the Ef1a2 promotor comprises a sequence of one of SEQ ID NOs: 333-335.

### Nucleic Acids

[0194] The isolated nucleic acid sequences of the disclosure can be obtained using any of the many recombinant methods known in the art, such as, for example by screening libraries from cells expressing the gene, by deriving the gene from a vector known to include the same, or by isolating directly from cells and tissues containing the same, using standard techniques. Alternatively, the gene of interest can be produced synthetically, rather than cloned.

[0195] The isolated nucleic acid may comprise any type of nucleic acid, including, but not limited to DNA and RNA. For example, in one embodiment, the composition comprises an isolated DNA molecule, including for example, an isolated cDNA molecule, encoding a protein of the disclosure. In one embodiment, the composition comprises an isolated RNA molecule encoding a protein of the disclosure, or a functional fragment thereof.

[0196] The nucleic acid molecules of the present disclosure can be modified to improve stability in serum or in growth medium for cell cultures. Modifications can be added to enhance stability, functionality, and/or specificity and to minimize immunostimulatory properties of the nucleic acid molecule of the disclosure. For example, in order to enhance the stability, the 3′-residues may be stabilized against degradation, e.g., they may be selected such that they consist of purine nucleotides, particularly adenosine or guanosine nucleotides. Alternatively, substitution of pyrimidine nucleotides by modified analogues, e.g., substitution of uridine by 2′-deoxythymidine is tolerated and does not affect function of the molecule.

[0197] In one embodiment of the present disclosure the nucleic acid molecule may contain at least one modified nucleotide analogue. For example, the ends may be stabilized by incorporating modified nucleotide analogues.

[0198] Non-limiting examples of nucleotide analogues include sugar- and/or backbone-modified ribonucleotides (i.e., include modifications to the phosphate-sugar backbone). For example, the phosphodiester linkages of natural RNA may be modified to include at least one of a nitrogen or sulfur heteroatom. In exemplary backbone-modified ribonucleotides the phosphoester group connecting to adjacent ribonucleotides is replaced by a modified group, e.g., of phosphothioate group. In exemplary sugar-modified ribonucleotides, the 2′ OH-group is replaced by a group selected from H, OR, R, halo, SH, SR, NH₂, NHR, NR₂ or ON, wherein R is C₁-C₆ alkyl, alkenyl or alkynyl and halo is F, Cl, Br or I.

[0199] Other examples of modifications are nucleobase-modified ribonucleotides, i.e., ribonucleotides, containing at least one non-naturally occurring nucleobase instead of a naturally occurring nucleobase. Bases may be modified to block the activity of adenosine deaminase. Exemplary modified nucleobases include, but are not limited to, uridine and/or cytidine modified at the 5-position, e.g., 5-(2-amino)propyl uridine, 5-bromo uridine; adenosine and/or guanosines modified at the 8 position, e.g., 8-bromo guanosine; deaza nucleotides, e.g., 7-deaza-adenosine; O- and N-alkylated nucleotides, e.g., N6-methyl adenosine are suitable. It should be noted that the above modifications may be combined.

[0200] In some instances, the nucleic acid molecule comprises at least one of the following chemical modifications: 2′-H, 2′-O-methyl, or 2′-OH modification of one or more nucleotides. In certain embodiments, a nucleic acid molecule of the disclosure can have enhanced resistance to nucleases. For increased nuclease resistance, a nucleic acid molecule, can include, for example, 2′-modified ribose units and/or phosphorothioate linkages. For example, the 2′ hydroxyl group (OH) can be modified or replaced with a number of different “oxy” or “deoxy” substituents. For increased nuclease resistance the nucleic acid molecules of the disclosure can include 2′-O-methyl, 2′-fluorine, 2′-O-methoxyethyl, 2′-O-aminopropyl, 2′-amino, and/or phosphorothioate linkages. Inclusion of locked nucleic acids (LNA), ethylene nucleic acids (ENA), e.g., 2′-4′-ethylene-bridged nucleic acids, and certain nucleobase modifications such as 2-amino-A, 2-thio (e.g., 2-thio-U), G-clamp modifications, can also increase binding affinity to a target.

[0201] In one embodiment, the nucleic acid molecule includes a 2′-modified nucleotide, e.g., a 2′-deoxy, 2′-deoxy-2′-fluoro, 2′-O-methyl, 2′-O-methoxyethyl (2′-O-MOE), 2′-O-aminopropyl (2′-O-AP), 2′-O-dimethylaminoethyl (2′-O-DMAOE), 2′-O-dimethylaminopropyl (2′-O-DMAP), 2′-O-dimethylaminoethyloxyethyl (2′-O-DMAEOE), or 2′-O—N-methylacetamido (2′-O-NMA). In one embodiment, the nucleic acid molecule includes at least one 2′-O-methyl-modified nucleotide, and in some embodiments, all of the nucleotides of the nucleic acid molecule include a 2′-O-methyl modification.

[0202] In certain embodiments, the nucleic acid molecule of the disclosure has one or more of the following properties:

[0203] Nucleic acid agents discussed herein include otherwise unmodified RNA and DNA as well as RNA and DNA that have been modified, e.g., to improve efficacy, and polymers of nucleoside surrogates. Unmodified RNA refers to a molecule in which the components of the nucleic acid, namely sugars, bases, and phosphate moieties, are the same or essentially the same as that which occur in nature, or as occur naturally in the human body. The art has referred to rare or unusual, but naturally occurring, RNAs as modified RNAs, see, e.g., Limbach et al. (Nucleic Acids Res., 1994, 22:2183-2196). Such rare or unusual RNAs, often termed modified RNAs, are typically the result of a post-transcriptional modification and are within the term unmodified RNA as used herein. Modified RNA, as used herein, refers to a molecule in which one or more of the components of the nucleic acid, namely sugars, bases, and phosphate moieties, are different from that which occur in nature, or different from that which occurs in the human body. While they are referred to as “modified RNAs” they will of course, because of the modification, include molecules that are not, strictly speaking, RNAs. Nucleoside surrogates are molecules in which the ribophosphate backbone is replaced with a non-ribophosphate construct that allows the bases to be presented in the correct spatial relationship such that hybridization is substantially similar to what is seen with a ribophosphate backbone, e.g., non-charged mimics of the ribophosphate backbone.

[0204] Modifications of the nucleic acid of the disclosure may be present at one or more of, a phosphate group, a sugar group, backbone, N-terminus, C-terminus, or nucleobase.

[0205] The present disclosure also includes a vector in which the isolated nucleic acid of the present disclosure is inserted. The art is replete with suitable vectors that are useful in the present disclosure.

[0206] In brief summary, the expression of natural or synthetic nucleic acids encoding a protein of the disclosure is typically achieved by operably linking a nucleic acid encoding the protein of the disclosure or portions thereof to a promoter, and incorporating the construct into an expression vector. The vectors to be used are suitable for replication and, optionally, integration in eukaryotic cells. Typical vectors contain transcription and translation terminators, initiation sequences, and promoters useful for regulation of the expression of the desired nucleic acid sequence.

[0207] The vectors of the present disclosure may also be used for nucleic acid immunization and gene therapy, using standard gene delivery protocols. Methods for gene delivery are known in the art. See, e.g., U.S. Pat. Nos. 5,399,346, 5,580,859, 5,589,466, incorporated by reference herein in their entireties. In another embodiment, the disclosure provides a gene therapy vector.

[0208] The isolated nucleic acid of the disclosure can be cloned into a number of types of vectors. For example, the nucleic acid can be cloned into a vector including, but not limited to a plasmid, a phagemid, a phage derivative, an animal virus, and a cosmid. Vectors of particular interest include expression vectors, replication vectors, probe generation vectors, and sequencing vectors.

[0209] Further, the vector may be provided to a cell in the form of a viral vector. Viral vector technology is well known in the art and is described, for example, in Sambrook et al. (2012, Molecular Cloning: A Laboratory Manual, Cold Spring Harbor Laboratory, New York), and in other virology and molecular biology manuals. Viruses, which are useful as vectors include, but are not limited to, retroviruses, adenoviruses, adeno-associated viruses, herpes viruses, and lentiviruses. In general, a suitable vector contains an origin of replication functional in at least one organism, a promoter sequence, convenient restriction endonuclease sites, and one or more selectable markers, (e.g., WO 01/96584; WO 01/29058; and U.S. Pat. No. 6,326,193).

### Delivery Systems and Methods

[0210] In one aspect, the disclosure relates to the development of novel lentiviral packaging and delivery systems. The lentiviral particle delivers the viral enzymes as proteins. In this fashion, lentiviral enzymes are short lived, thus limiting the potential for off-target editing due to long term expression though the entire life of the cell. The incorporation of editing components, or traditional CRISPR-Cas editing components as proteins in lentiviral particles is advantageous, given that their required activity is only required for a short period of time. Thus, in one embodiment, the disclosure provides a lentiviral delivery system and methods of delivering the compositions of the disclosure, editing genetic material, and nucleic acid delivery using lentiviral delivery systems.

[0211] For example, in one aspect, the delivery system comprises (1) an packaging plasmid (2) a transfer plasmid, and (3) an envelope plasmid. In one embodiment, the packaging plasmid comprises a nucleic acid sequence encoding a modified gag-pol polyprotein. In one embodiment, the modified gag-pol polyprotein comprises integrase fused to a editing protein. In one embodiment, the modified gag-pol polyprotein comprises integrase fused to a Cas protein. In one embodiment, the modified gag-pol polyprotein comprises integrase fused to a catalytically dead Cas protein (dCas). In one embodiment, the packaging plasmid further comprises a sequence encoding a sgRNA sequence.

[0212] In one embodiment, the transfer plasmid comprises a donor sequence. The donor sequence can be any nucleic acid sequence to be delivered to a genome. In one embodiment, the transfer plasmid comprises a 5′ long terminal repeat (LTR) sequence and a 3′ LTR sequence. In one embodiment, the 3′ LTR is a Self-inactivating (SIN) LTR. Thus, in one embodiment, the 5′ LTR comprises a U3 sequence, an R sequence and a U5 sequence and the 3′ LTR comprises an R sequence and a U5 sequence, but does not comprise a U3 sequence. In one embodiment, the 5′ LTR and the 3′ LTR are specific to the Integrase in the packaging plasmid.

[0213] In one embodiment, the donor template is the wild type FXN gene or a fragment thereof. In one embodiment, donor template nucleic acid encodes a protein having at least 70%, at least 71%, at least 72%, at least 73%, at least 74%, at least 75%, at least 76%, at least 77%, at least 78%, at least 79%, 80%, at least 81%, at least 82%, at least 83%, at least 84%, at least 85%, at least 86%, at least 87%, at least 88%, at least 89%, 90%, at least 91%, at least 92%, at least 93%, at least 94%, at least 95%, at least 96%, at least 97%, at least 98%, or at least 99% homology to SEQ ID NO:357. In one embodiment, donor template nucleic acid encodes a protein of SEQ ID NO:357. In one embodiment, donor template nucleic acid comprises a sequence having at least 70%, at least 71%, at least 72%, at least 73%, at least 74%, at least 75%, at least 76%, at least 77%, at least 78%, at least 79%, 80%, at least 81%, at least 82%, at least 83%, at least 84%, at least 85%, at least 86%, at least 87%, at least 88%, at least 89%, 90%, at least 91%, at least 92%, at least 93%, at least 94%, at least 95%, at least 96%, at least 97%, at least 98%, or at least 99% homology to SEQ ID NO:358. In one embodiment, donor template nucleic acid comprises a sequence of SEQ ID NO:358.

[0214] In one embodiment, the transfer plasmid comprises a promotor to drive the expression of the donor sequence. In one embodiment, the promotor is a Ef1a2 promotor to drive the expression of a protein or gene described herein. In one embodiment, the promotor is Ef1a2 promotor is capable of driving expression in heart, skeletal muscle and neural tissues, such as brain and motor neurons. In one embodiment, the Ef1a2 promotor comprises a sequence at least 70%, at least 71%, at least 72%, at least 73%, at least 74%, at least 75%, at least 76%, at least 77%, at least 78%, at least 79%, 80%, at least 81%, at least 82%, at least 83%, at least 84%, at least 85%, at least 86%, at least 87%, at least 88%, at least 89%, 90%, at least 91%, at least 92%, at least 93%, at least 94%, at least 95%, at least 96%, at least 97%, at least 98%, or at least 99% identical to one of SEQ ID NOs: 333-335. In one embodiment, the Ef1a2 promotor comprises a sequence of one of SEQ ID NOs: 333-335.

[0215] In one embodiment, the packaging plasmid comprises an sequence encoding an HIV IN and the transfer plasmid comprises a U3 sequence of SEQ ID NO:258, a U5 sequence of SEQ ID NO: 259, or both.

[0216] In one embodiment, the transfer plasmid comprises a sequence at least 70%, at least 71%, at least 72%, at least 73%, at least 74%, at least 75%, at least 76%, at least 77%, at least 78%, at least 79%, 80%, at least 81%, at least 82%, at least 83%, at least 84%, at least 85%, at least 86%, at least 87%, at least 88%, at least 89%, 90%, at least 91%, at least 92%, at least 93%, at least 94%, at least 95%, at least 96%, at least 97%, at least 98%, or at least 99% homology to SEQ ID NO:359. In one embodiment, the transfer plasmid comprises a sequence of SEQ ID NO:359.

[0217] In one embodiment, the envelope plasmid comprises a nucleic acid sequence encoding an envelope protein. In one embodiment, the envelope plasmid comprises a nucleic acid sequence encoding an HIV envelope protein. In one embodiment, the envelope plasmid comprises a nucleic acid sequence encoding a vesicular stomatitis virus g-protein envelope protein. In one embodiment, the envelope protein can be selected based on the desired cell type.

[0218] In one embodiment, the packaging plasmid, transfer plasmid, and envelope plasmid are introduced into a cell. In one embodiment, the cell transcribes and translates the nucleic acid sequence encoding the modified gag-pol protein to produce the modified gag-pol protein. In one embodiment, the cell transcribes the nucleic acid sequence encoding the sgRNA. In one embodiment, the sgRNA binds to the Integrase-Cas fusion protein. In one embodiment, the cell transcribes and translates the nucleic acid sequence encoding the envelope protein to produce the envelope protein. In one embodiment, the cell transcribes the donor sequence to provide a Donor Sequence RNA molecule. In one embodiment, the modified gag-pol protein, which is bound to the sgRNA, envelope polyprotein, and donor sequence RNA are packaged into a viral particle. In one embodiment, the viral particles are collected from the cell media. In one embodiment, the viral particles transduce a target cell, wherein the sgRNA binds a target region of the cellular DNA thereby targeting the IN-Cas9 fusion protein, and the Integrase catalyzes the integration of the donor sequence into the cellular DNA.

[0219] In one aspect, the delivery system comprises (1) a packaging plasmid (2) a transfer plasmid, (3) an envelope plasmid, and (4) a VPR-IN-dCas plasmid. In one embodiment, the packaging plasmid comprises a nucleic acid sequence encoding a gag-pol polyprotein. In one embodiment, the gag-pol polyprotein comprises catalytically dead integrase. In one embodiment, the gag-pol polyprotein comprises the D116N integrase mutation.

[0220] In one embodiment, the transfer plasmid comprises a donor sequence. The donor sequence can be any nucleic acid sequence to be delivered to a genome. In one embodiment, the transfer plasmid comprises a 5′ long terminal repeat (LTR) sequence and a 3′ LTR sequence. In one embodiment, the 3′ LTR is a Self-inactivating (SIN) LTR. Thus, in one embodiment, the 5′ LTR comprises a U3 sequence, an R sequence and a U5 sequence and the 3′ LTR comprises an R sequence and a U5 sequence, but does not comprise a U3 sequence. In one embodiment, the 5′ LTR and the 3′ LTR are specific to the integrase in the VPR-IN-dCas packaging plasmid.

[0221] In one embodiment, the envelope plasmid comprises a nucleic acid sequence encoding an envelope protein. In one embodiment, the envelope plasmid comprises a nucleic acid sequence encoding an HIV envelope protein. In one embodiment, the envelope plasmid comprises a nucleic acid sequence encoding a vesicular stomatitis virus g-protein (VSV-g) envelope protein. In one embodiment, the envelope protein can be selected based on the desired cell type.

[0222] In one embodiment, the VPR-IN-dCas plasmid comprises a nucleic acid sequence encoding a fusion protein comprising VPR, integrase, and an editing protein. In one embodiment, the VPR-IN-dCas plasmid comprises a nucleic acid sequence encoding a fusion protein comprising VPR, integrase and a Cas protein. In one embodiment, the VPR-IN-dCas plasmid comprises a nucleic acid sequence encoding a fusion protein comprising VPR, integrase and a dCas protein. In one embodiment, the fusion protein comprises a protease clevage site between VPR and integrase. In one embodiment, the VPR-IN-dCas plasmid packaging plasmid further comprises a sequence encoding a sgRNA sequence.

[0223] In one embodiment, the packaging plasmid, transfer plasmid, envelope plasmid, and VPR-IN-dCas plasmid are introduced into a cell. In one embodiment, the cell transcribes and translates the nucleic acid sequence encoding the gag-pol protein to produce the gag-pol polyprotein. In one embodiment, the cell transcribes and translates the nucleic acid sequence encoding the envelope protein to produce the envelope protein. In one embodiment, the cell transcribes the donor sequence to provide a Donor Sequence RNA molecule. In one embodiment, the cell transcribes and translates the fusion protein to produce the VPR-integrase-editing protein fusion protein. In one embodiment, the cell transcribes and translates the fusion protein to produce the VPR-integrase-dCas fusion protein. In one embodiment, the cell transcribes the nucleic acid sequence encoding the sgRNA. In one embodiment, the sgRNA binds to the VPR-integrase-dCas fusion protein.

[0224] In one embodiment, the gag-pol protein, envelope polyprotein, donor sequence RNA, and VPR-integrase-dCas9 protein, which is bound to the sgRNA, are packaged into a viral particle. In one embodiment, the viral particles are collected from the cell media. In one embodiment, VPR is cleaved from the fusion protein in the viral particle via the protease site to provide a IN-dCas fusion protein. In one embodiment, the viral particles transduce a target cell, wherein the sgRNA binds a target region of the cellular DNA thereby targeting the IN-dCas fusion protein, and the integrase catalyzes the integration of the donor sequence into the cellular DNA.

[0225] In one aspect, the delivery system comprises (1) an transfer plasmid, (2) packaging plasmid, and (3) an envelope plasmid. In one embodiment, the packaging plasmid comprises a nucleic acid sequence encoding a gag-pol polyprotein. In one embodiment, the gag-pol polyprotein comprises catalytically dead integrase. In one embodiment, the gag-pol polyprotein comprises the D116N integrase mutation.

[0226] In one embodiment, the transfer plasmid comprises a nucleic acid encoding an sgRNA and a nucleic acid sequence encoding a fusion protein comprising integrase and a editing protein. In one embodiment, the transfer plasmid comprises a 5′ long terminal repeat (LTR) sequence and a 3′ LTR sequence. In one embodiment, the 3′ LTR is a Self-inactivating (SIN) LTR. Thus, in one embodiment, the 5′ LTR comprises a U3 sequence, an R sequence and a U5 sequence and the 3′ LTR comprises an R sequence and a U5 sequence, but does not comprise a U3 sequence. In one embodiment, the 5′ LTR and the 3′ LTR are specific to the integrase of the fusion protein. In one embodiment, the fusion protein comprises integrase and a Cas protein. In one embodiment, the fusion protein comprises integrase and a dCas protein. In one embodiment, the 5′LTR and 3′LTR flank the sequence encoding the fusion protein and the sequence encoding the sgRNA.

[0227] In one embodiment, the envelope plasmid comprises a nucleic acid sequence encoding an envelope protein. In one embodiment, the envelope plasmid comprises a nucleic acid sequence encoding an HIV envelope protein. In one embodiment, the envelope plasmid comprises a nucleic acid sequence encoding a vesicular stomatitis virus g-protein (VSV-g) envelope protein. In one embodiment, the envelope protein can be selected based on the desired cell type.

[0228] In one embodiment, the packaging plasmid, transfer plasmid, and envelope plasmid are introduced into a cell. In one embodiment, the cell transcribes and translates the nucleic acid sequence encoding the gag-pol protein to produce the gag-pol polyprotein. In one embodiment, the cell transcribes and translates the nucleic acid sequence encoding the envelope protein to produce the envelope protein. In one embodiment, the cell transcribes the nucleic acid sequence encoding the sgRNA. In one embodiment, the cell transcribes the nucleic acid sequence encoding the fusion protein.

[0229] In one embodiment, the gag-pol protein, envelope polyprotein, donor sequence RNA, and VPR-integrase-dCas9 protein, which is bound to the sgRNA, are packaged into a viral particle. In one embodiment, the viral particles are collected from the cell media. In one embodiment, the viral particles transduce a target cell, wherein the virus reverse translates, and the cell expresses the fusion protein and sgRNA. In one embodiment, the sgRNA binds to the Cas protein of the fusion protein and to another viral DNA transcript, wherein the integrase catalyzes self-integration. In one embodiment, the sgRNA binds to the Cas protein of the fusion protein and to a target region of the cellular DNA, thereby disrupting the target gene.

[0230] In one aspect, the delivery system comprises (1) an transfer plasmid, (2) a first packaging plasmid, (3) a first envelope plasmid, (4) a second packaging plasmid, (5) a second envelope plasmid, and (6) a transfer plasmid. In one embodiment, the first packaging plasmid comprises a nucleic acid sequence encoding a gag-pol polyprotein. In one embodiment, the second packaging plasmid comprises a nucleic acid sequence encoding a gag-pol polyprotein. In one embodiment, the gag-pol polyprotein comprises catalytically dead integrase. In one embodiment, the gag-pol polyprotein comprises the D116N or D64V integrase mutation.

[0231] In one embodiment, the first envelope plasmid comprises a nucleic acid sequence encoding an envelope protein. In one embodiment, the second envelope plasmid comprises a nucleic acid sequence encoding an envelope protein. In one embodiment, the envelope plasmid comprises a nucleic acid sequence encoding an HIV envelope protein. In one embodiment, the envelope plasmid comprises a nucleic acid sequence encoding a vesicular stomatitis virus g-protein (VSV-g) envelope protein. In one embodiment, the envelope protein can be selected based on the desired cell type.

[0232] In one embodiment, the transfer plasmid comprises a nucleic acid encoding an sgRNA and a nucleic acid sequence encoding a fusion protein comprising integrase and a editing protein. In one embodiment, the fusion protein comprises integrase and a Cas protein. In one embodiment, the fusion protein comprises integrase and a dCas protein. In one embodiment, the integrase of the fusion protein is from a different species of lentivirus compared to the gag-pol polyprotein of the first and second packaging plasmid. For example, in one embodiment, the transfer plasmid comprises a nucleic acid encoding a fusion protein comprising FIV integrase and Cas, and the first and second packaging plasmids comprise a nucleic acid sequences encoding a HIV gag-pol polyprotein. In one embodiment, use of different lentiviral species prevents self-integration.

[0233] In one embodiment, the transfer plasmid comprises a 5′ long terminal repeat (LTR) sequence and a 3′ LTR sequence. In one embodiment, the 3′ LTR is a Self-inactivating (SIN) LTR. Thus, in one embodiment, the 5′ LTR comprises a U3 sequence, an R sequence and a U5 sequence and the 3′ LTR comprises an R sequence and a U5 sequence, but does not comprise a U3 sequence. In one embodiment, the 5′ LTR and the 3′ LTR are specific to the integrase of the gag-pol polyprotein. In one embodiment, the 5′LTR and 3′LTR flank the sequence encoding the fusion protein and the sequence encoding the sgRNA.

[0234] In one embodiment, the transfer plasmid comprises a donor sequence. The donor sequence can be any nucleic acid sequence to be delivered to a genome. In one embodiment, the transfer plasmid comprises a 5′ long terminal repeat (LTR) sequence and a 3′ LTR sequence. In one embodiment, the 3′ LTR is a Self-inactivating (SIN) LTR. Thus, in one embodiment, the 5′ LTR comprises a U3 sequence, an R sequence and a U5 sequence and the 3′ LTR comprises an R sequence and a U5 sequence, but does not comprise a U3 sequence. In one embodiment, the 5′ LTR and the 3′ LTR are specific to the integrase in the Inscrtipter transfer plasmid.

[0235] In one embodiment, the first packaging plasmid, transfer plasmid, and first envelope plasmid are introduced into a cell. In one embodiment, the cell transcribes and translates the nucleic acid sequence encoding the gag-pol protein to produce the gag-pol polyprotein. In one embodiment, the cell transcribes and translates the nucleic acid sequence encoding the envelope protein to produce the envelope protein. In one embodiment, the cell transcribes the nucleic acid sequence encoding the sgRNA. In one embodiment, the cell transcribes the nucleic acid sequence encoding the fusion protein. In one embodiment, the gag-pol protein, envelope polyprotein, gRNA and fusion protein RNA, are packaged into a first viral particle. In one embodiment, the first viral particles are collected from the cell media.

[0236] In one embodiment, the second packaging plasmid, transfer plasmid, and second envelope plasmid are introduced into a cell. In one embodiment, the cell transcribes and translates the nucleic acid sequence encoding the gag-pol polyprotein to produce the gag-pol polyprotein. In one embodiment, the cell transcribes and translates the nucleic acid sequence encoding the envelope protein to produce the envelope protein. In one embodiment, the cell transcribes the donor sequence to provide a Donor Sequence RNA molecule. In one embodiment, the gag-pol polyprotein, envelope polyprotein, and donor sequence RNA are packaged into a second viral particle. In one embodiment, the second viral particles are collected from the cell media.

[0237] In one embodiment, the first packaging plasmid, transfer plasmid, first envelope plasmid, the second packaging plasmid, transfer plasmid, and second envelope plasmid are introduced into the same cell. In one embodiment, the first packaging plasmid, transfer plasmid, first envelope plasmid, are introduced into a different cell as the the second packaging plasmid, transfer plasmid, and second envelope plasmid.

[0238] In one embodiment, the first viral particles and second viral particles transduce a target cell. In one embodiment, the virus reverse translates, and the cell expresses the fusion protein and sgRNA, wherein the sgRNA binds to the dCas of the fusion protein. In one embodiment, the virus reverse translates the donor sequence RNA into a donor DNA sequence, which binds to the integrase of the fusion protein. In one embodiment, the sgRNA binds a target region of the cellular DNA thereby targeting the IN-dCas fusion protein, and the integrase catalyzes the integration of the donor DNA sequence into the cellular DNA.

[0239] Further, a number of additional viral based systems have been developed for gene transfer into mammalian cells. For example, retroviruses provide a convenient platform for gene delivery systems. A selected gene can be inserted into a vector and packaged in retroviral particles using techniques known in the art. The recombinant virus can then be isolated and delivered to cells of the subject either in vivo or ex vivo. A number of retroviral systems are known in the art. In some embodiments, adenovirus vectors are used. A number of adenovirus vectors are known in the art. In one embodiment, lentivirus vectors are used.

[0240] For example, vectors derived from retroviruses such as the lentivirus are suitable tools to achieve long-term gene transfer since they allow long-term, stable integration of a transgene and its propagation in daughter cells. Lentiviral vectors have the added advantage over vectors derived from onco-retroviruses such as murine leukemia viruses in that they can transduce non-proliferating cells, such as hepatocytes. They also have the added advantage of low immunogenicity.

[0241] In one embodiment, the composition includes a vector derived from an adeno-associated virus (AAV). The term “AAV vector” means a vector derived from an adeno-associated virus serotype, including without limitation, AAV-1, AAV-2, AAV-3, AAV-4, AAV-5, AAV-6, AAV-7, AAV-8, and AAV-9. AAV vectors have become powerful gene delivery tools for the treatment of various disorders. AAV vectors possess a number of features that render them ideally suited for gene therapy, including a lack of pathogenicity, minimal immunogenicity, and the ability to transduce postmitotic cells in a stable and efficient manner. Expression of a particular gene contained within an AAV vector can be specifically targeted to one or more types of cells by choosing the appropriate combination of AAV serotype, promoter, and delivery method.

[0242] AAV vectors can have one or more of the AAV wild-type genes deleted in whole or part, preferably the rep and/or cap genes, but retain functional flanking ITR sequences. Despite the high degree of homology, the different serotypes have tropisms for different tissues. The receptor for AAV1 is unknown; however, AAV1 is known to transduce skeletal and cardiac muscle more efficiently than AAV2. Since most of the studies have been done with pseudotyped vectors in which the vector DNA flanked with AAV2 ITR is packaged into capsids of alternate serotypes, it is clear that the biological differences are related to the capsid rather than to the genomes. Recent evidence indicates that DNA expression cassettes packaged in AAV 1 capsids are at least 1 log 10 more efficient at transducing cardiomyocytes than those packaged in AAV2 capsids. In one embodiment, the viral delivery system is an adeno-associated viral delivery system. The adeno-associated virus can be of serotype 1 (AAV 1), serotype 2 (AAV2), serotype 3 (AAV3), serotype 4 (AAV4), serotype 5 (AAV5), serotype 6 (AAV6), serotype 7 (AAV7), serotype 8 (AAV8), or serotype 9 (AAV9).

[0243] Desirable AAV fragments for assembly into vectors include the cap proteins, including the vp1, vp2, vp3 and hypervariable regions, the rep proteins, including rep 78, rep 68, rep 52, and rep 40, and the sequences encoding these proteins. These fragments may be readily utilized in a variety of vector systems and host cells. Such fragments may be used alone, in combination with other AAV serotype sequences or fragments, or in combination with elements from other AAV or non-AAV viral sequences. As used herein, artificial AAV serotypes include, without limitation, AAV with a non-naturally occurring capsid protein. Such an artificial capsid may be generated by any suitable technique, using a selected AAV sequence (e.g., a fragment of a vp1 capsid protein) in combination with heterologous sequences which may be obtained from a different selected AAV serotype, non-contiguous portions of the same AAV serotype, from a non-AAV viral source, or from a non-viral source. An artificial AAV serotype may be, without limitation, a chimeric AAV capsid, a recombinant AAV capsid, or a “humanized” AAV capsid. Thus exemplary AAVs, or artificial AAVs, suitable for expression of one or more proteins, include AAV2/8 (see U.S. Pat. No. 7,282,199), AAV2/5 (available from the National Institutes of Health), AAV2/9 (International Patent Publication No. WO2005/033321), AAV2/6 (U.S. Pat. No. 6,156,303), and AAVrh8 (International Patent Publication No. WO2003/042397), among others.

[0244] Methods for generating and isolating AAV viral vectors suitable for delivery to a subject are known in the art. See, e.g., U.S. Pat. Nos. 7,790,449; 7,282,199; WO 2003/042397; WO 2005/033321, WO 2006/110689; and U.S. Pat. No. 7,588,772 B2]. In a one system, a producer cell line is transiently transfected with a construct that encodes the transgene flanked by ITRs and a construct(s) that encodes rep and cap. In a second system, a packaging cell line that stably supplies rep and cap is transiently transfected with a construct encoding the transgene flanked by ITRs. In each of these systems, AAV virions are produced in response to infection with helper adenovirus or herpesvirus, requiring the separation of the rAAVs from contaminating virus. More recently, systems have been developed that do not require infection with helper virus to recover the AAV—the required helper functions (i.e., adenovirus E1, E2a, VA, and E4 or herpesvirus UL5, UL8, UL52, and UL29, and herpesvirus polymerase) are also supplied, in trans, by the system. In these newer systems, the helper functions can be supplied by transient transfection of the cells with constructs that encode the required helper functions, or the cells can be engineered to stably contain genes encoding the helper functions, the expression of which can be controlled at the transcriptional or posttranscriptional level. In yet another system, the transgene flanked by ITRs and rep/cap genes are introduced into insect cells by infection with baculovirus-based vectors. For reviews on these production systems, see generally, e.g., Zhang et al., 2009, “Adenovirus-adeno-associated virus hybrid for large-scale recombinant adeno-associated virus production,” Human Gene Therapy 20:922-929, the contents of each of which is incorporated herein by reference in its entirety. Methods of making and using these and other AAV production systems are also described in the following U.S. patents, the contents of each of which is incorporated herein by reference in its entirety: U.S. Pat. Nos. 5,139,941; 5,741,683; 6,057,152; 6,204,059; 6,268,213; 6,491,907; 6,660,514; 6,951,753; 7,094,604; 7,172,893; 7,201,898; 7,229,823; and 7,439,065. See generally, e.g., Grieger & Samulski, 2005, “Adeno-associated virus as a gene therapy vector: Vector development, production and clinical applications,” Adv. Biochem. Engin/Biotechnol. 99: 119-145; Buning et al., 2008, “Recent developments in adeno-associated virus vector technology,” J. Gene Med. 10:717-733; and the references cited below, each of which is incorporated herein by reference in its entirety. The methods used to construct any embodiment of this invention are known to those with skill in nucleic acid manipulation and include genetic engineering, recombinant engineering, and synthetic techniques. See, e.g., Green and Sambrook et al, Molecular Cloning: A Laboratory Manual, Cold Spring Harbor Press, Cold Spring Harbor, N.Y. (2012). Similarly, methods of generating rAAV virions are well known and the selection of a suitable method is not a limitation on the present invention. See, e.g., K. Fisher et al, (1993) J. Virol., 70:520-532 and U.S. Pat. No. 5,478,745.

[0245] In one aspect, the delivery system comprises an AAV transfer plasmid. In one embodiment, the AAV transfer plasmid comprises a nucleic acid sequence encoding a donor sequence. The donor sequence can be any nucleic acid sequence to be delivered to a genome. In one embodiment, the AAV transfer plasmid comprises a 5′ inverted terminal repeat (ITR) sequence and a 3′ ITR sequence. The ITR sequences may be of the same AAV origin as the capsid, or which are of a different AAV origin. In one embodiment, the ITR sequences from AAV2, or the deleted version thereof (AITR).

[0246] In one embodiment, the donor sequence is the wild type FXN gene or a fragment thereof. In one embodiment, donor sequence encodes a protein having at least 70%, at least 71%, at least 72%, at least 73%, at least 74%, at least 75%, at least 76%, at least 77%, at least 78%, at least 79%, 80%, at least 81%, at least 82%, at least 83%, at least 84%, at least 85%, at least 86%, at least 87%, at least 88%, at least 89%, 90%, at least 91%, at least 92%, at least 93%, at least 94%, at least 95%, at least 96%, at least 97%, at least 98%, or at least 99% homology to SEQ ID NO:357. In one embodiment, donor sequence encodes a protein of SEQ ID NO:357. In one embodiment, donor sequence comprises a sequence having at least 70%, at least 71%, at least 72%, at least 73%, at least 74%, at least 75%, at least 76%, at least 77%, at least 78%, at least 79%, 80%, at least 81%, at least 82%, at least 83%, at least 84%, at least 85%, at least 86%, at least 87%, at least 88%, at least 89%, 90%, at least 91%, at least 92%, at least 93%, at least 94%, at least 95%, at least 96%, at least 97%, at least 98%, or at least 99% homology to SEQ ID NO:358. In one embodiment, donor sequence comprises a sequence of SEQ ID NO:358.

[0247] In one embodiment, the transfer plasmid comprises a sequence at least 70%, at least 71%, at least 72%, at least 73%, at least 74%, at least 75%, at least 76%, at least 77%, at least 78%, at least 79%, 80%, at least 81%, at least 82%, at least 83%, at least 84%, at least 85%, at least 86%, at least 87%, at least 88%, at least 89%, 90%, at least 91%, at least 92%, at least 93%, at least 94%, at least 95%, at least 96%, at least 97%, at least 98%, or at least 99% homology to SEQ ID NO:360. In one embodiment, the transfer plasmid comprises a sequence of SEQ ID NO:360.

[0248] In certain embodiments, the vector also includes conventional control elements which are operably linked to the transgene in a manner which permits its transcription, translation and/or expression in a cell transfected with the plasmid vector or infected with the virus produced by the disclosure. As used herein, “operably linked” sequences include both expression control sequences that are contiguous with the gene of interest and expression control sequences that act in trans or at a distance to control the gene of interest. Expression control sequences include appropriate transcription initiation, termination, promoter and enhancer sequences; efficient RNA processing signals such as splicing and polyadenylation (polyA) signals; sequences that stabilize cytoplasmic mRNA; sequences that enhance translation efficiency (i.e., Kozak consensus sequence); sequences that enhance protein stability; and when desired, sequences that enhance secretion of the encoded product. A great number of expression control sequences, including promoters which are native, constitutive, inducible and/or tissue-specific, are known in the art and may be utilized.

[0249] Additional promoter elements, e.g., enhancers, regulate the frequency of transcriptional initiation. Typically, these are located in the region 30-110 bp upstream of the start site, although a number of promoters have recently been shown to contain functional elements downstream of the start site as well. The spacing between promoter elements frequently is flexible, so that promoter function is preserved when elements are inverted or moved relative to one another. In the thymidine kinase (tk) promoter, the spacing between promoter elements can be increased to 50 bp apart before activity begins to decline. Depending on the promoter, it appears that individual elements can function either cooperatively or independently to activate transcription.

[0250] One example of a suitable promoter is the immediate early cytomegalovirus (CMV) promoter sequence. This promoter sequence is a strong constitutive promoter sequence capable of driving high levels of expression of any polynucleotide sequence operatively linked thereto. Another example of a suitable promoter is Elongation Growth Factor-1α (EF-1α). However, other constitutive promoter sequences may also be used, including, but not limited to the simian virus 40 (SV40) early promoter, mouse mammary tumor virus (MMTV), human immunodeficiency virus (HIV) long terminal repeat (LTR) promoter, MoMuLV promoter, an avian leukemia virus promoter, an Epstein-Barr virus immediate early promoter, a Rous sarcoma virus promoter, as well as human gene promoters such as, but not limited to, the actin promoter, the myosin promoter, the hemoglobin promoter, and the creatine kinase promoter. Further, the disclosure should not be limited to the use of constitutive promoters. Inducible promoters are also contemplated as part of the disclosure. The use of an inducible promoter provides a molecular switch capable of turning on expression of the polynucleotide sequence which it is operatively linked when such expression is desired, or turning off the expression when expression is not desired. Examples of inducible promoters include, but are not limited to a metallothionine promoter, a glucocorticoid promoter, a progesterone promoter, and a tetracycline promoter.

[0251] Enhancer sequences found on a vector also regulates expression of the gene contained therein. Typically, enhancers are bound with protein factors to enhance the transcription of a gene. Enhancers may be located upstream or downstream of the gene it regulates. Enhancers may also be tissue-specific to enhance transcription in a specific cell or tissue type. In one embodiment, the vector of the present disclosure comprises one or more enhancers to boost transcription of the gene present within the vector.

[0252] In order to assess the expression of a fusion protein of the disclosure, the expression vector to be introduced into a cell can also contain either a selectable marker gene or a reporter gene or both to facilitate identification and selection of expressing cells from the population of cells sought to be transfected or infected through viral vectors. In other aspects, the selectable marker may be carried on a separate piece of DNA and used in a co-transfection procedure. Both selectable markers and reporter genes may be flanked with appropriate regulatory sequences to enable expression in the host cells. Useful selectable markers include, for example, antibiotic-resistance genes, such as neo and the like.

[0253] Reporter genes are used for identifying potentially transfected cells and for evaluating the functionality of regulatory sequences. In general, a reporter gene is a gene that is not present in or expressed by the recipient organism or tissue and that encodes a polypeptide whose expression is manifested by some easily detectable property, e.g., enzymatic activity. Expression of the reporter gene is assayed at a suitable time after the DNA has been introduced into the recipient cells. Suitable reporter genes may include genes encoding luciferase, beta-galactosidase, chloramphenicol acetyl transferase, secreted alkaline phosphatase, or the green fluorescent protein gene (e.g., Ui-Tei et al., 2000 FEBS Letters 479: 79-82). Suitable expression systems are well known and may be prepared using known techniques or obtained commercially. In general, the construct with the minimal 5′ flanking region showing the highest level of expression of reporter gene is identified as the promoter. Such promoter regions may be linked to a reporter gene and used to evaluate agents for the ability to modulate promoter-driven transcription.

[0254] Methods of introducing and expressing genes into a cell are known in the art. In the context of an expression vector, the vector can be readily introduced into a host cell, e.g., mammalian, bacterial, yeast, or insect cell by any method in the art. For example, the expression vector can be transferred into a host cell by physical, chemical, or biological means.

[0255] Physical methods for introducing a polynucleotide into a host cell include calcium phosphate precipitation, lipofection, particle bombardment, microinjection, electroporation, and the like. Methods for producing cells comprising vectors and/or exogenous nucleic acids are well-known in the art. See, for example, Sambrook et al. (2012, Molecular Cloning: A Laboratory Manual, Cold Spring Harbor Laboratory, New York). An exemplary method for the introduction of a polynucleotide into a host cell is calcium phosphate transfection.

[0256] Biological methods for introducing a polynucleotide of interest into a host cell include the use of DNA and RNA vectors. Viral vectors, and especially retroviral vectors, have become the most widely used method for inserting genes into mammalian, e.g., human cells. Other viral vectors can be derived from lentivirus, poxviruses, herpes simplex virus I, adenoviruses and adeno-associated viruses, and the like. See, for example, U.S. Pat. Nos. 5,350,674 and 5,585,362.

[0257] Chemical means for introducing a polynucleotide into a host cell include colloidal dispersion systems, such as macromolecule complexes, nanocapsules, microspheres, beads, and lipid-based systems including oil-in-water emulsions, micelles, mixed micelles, and liposomes. An exemplary colloidal system for use as a delivery vehicle in vitro and in vivo is a liposome (e.g., an artificial membrane vesicle).

[0258] In the case where a non-viral delivery system is utilized, an exemplary delivery vehicle is a liposome. The use of lipid formulations is contemplated for the introduction of the nucleic acids into a host cell (in vitro, ex vivo or in vivo). In another aspect, the nucleic acid may be associated with a lipid. The nucleic acid associated with a lipid may be encapsulated in the aqueous interior of a liposome, interspersed within the lipid bilayer of a liposome, attached to a liposome via a linking molecule that is associated with both the liposome and the oligonucleotide, entrapped in a liposome, complexed with a liposome, dispersed in a solution containing a lipid, mixed with a lipid, combined with a lipid, contained as a suspension in a lipid, contained or complexed with a micelle, or otherwise associated with a lipid. Lipid, lipid/DNA or lipid/expression vector associated compositions are not limited to any particular structure in solution. For example, they may be present in a bilayer structure, as micelles, or with a “collapsed” structure. They may also simply be interspersed in a solution, possibly forming aggregates that are not uniform in size or shape. Lipids are fatty substances which may be naturally occurring or synthetic lipids. For example, lipids include the fatty droplets that naturally occur in the cytoplasm as well as the class of compounds which contain long-chain aliphatic hydrocarbons and their derivatives, such as fatty acids, alcohols, amines, amino alcohols, and aldehydes.

[0259] Lipids suitable for use can be obtained from commercial sources. For example, dimyristyl phosphatidylcholine (“DMPC”) can be obtained from Sigma, St. Louis, MO; dicetyl phosphate (“DCP”) can be obtained from K & K Laboratories (Plainview, NY); cholesterol (“Choi”) can be obtained from Calbiochem-Behring; dimyristyl phosphatidylglycerol (“DMPG”) and other lipids may be obtained from Avanti Polar Lipids, Inc. (Birmingham, AL). Stock solutions of lipids in chloroform or chloroform/methanol can be stored at about −20° C. Chloroform is used as the only solvent since it is more readily evaporated than methanol. “Liposome” is a generic term encompassing a variety of single and multilamellar lipid vehicles formed by the generation of enclosed lipid bilayers or aggregates. Liposomes can be characterized as having vesicular structures with a phospholipid bilayer membrane and an inner aqueous medium. Multilamellar liposomes have multiple lipid layers separated by aqueous medium. They form spontaneously when phospholipids are suspended in an excess of aqueous solution. The lipid components undergo self-rearrangement before the formation of closed structures and entrap water and dissolved solutes between the lipid bilayers (Ghosh et al., 1991 Glycobiology 5: 505-10). However, compositions that have different structures in solution than the normal vesicular structure are also encompassed. For example, the lipids may assume a micellar structure or merely exist as nonuniform aggregates of lipid molecules. Also contemplated are lipofectamine-nucleic acid complexes.

[0260] Regardless of the method used to introduce exogenous nucleic acids into a host cell, in order to confirm the presence of the recombinant DNA sequence in the host cell, a variety of assays may be performed. Such assays include, for example, “molecular biological” assays well known to those of skill in the art, such as Southern and Northern blotting, RT-PCR and PCR; “biochemical” assays, such as detecting the presence or absence of a particular peptide, e.g., by immunological means (ELISAs and Western blots) or by assays described herein to identify agents falling within the scope of the disclosure.

### Systems

[0261] In one aspect, the present disclosure provides a system for editing genetic material, such as nucleic acid molecule, a genome or, a gene. In one embodiment the system comprises, in one or more vectors, a nucleic acid sequence encoding a fusion protein, wherein the fusion protein comprises a retroviral integrase (IN), or a fragment thereof; a CRISPR-associated (Cas) protein, and a nuclear localization signal (NLS); a nucleic acid sequence coding a CRISPR-Cas system guide RNA; and a nucleic acid sequence coding a donor template nucleic acid, wherein the donor template nucleic acid comprises a U3 sequence, a U5 sequence and a donor template sequence. In one embodiment, the CRISPR-Cas system guide RNA substantially hybridizes to a target DNA sequence in the gene.

[0262] In one embodiment, the system comprises, in one or more vectors, a nucleic acid sequence encoding a fusion protein, wherein the fusion protein comprises a retroviral integrase (IN), or a fragment thereof; a CRISPR-associated (Cas) protein, and a nuclear localization signal (NLS); a nucleic acid sequence coding a first CRISPR-Cas system guide RNA; a nucleic acid sequence coding a second CRISPR-Cas system guide RNA; and a nucleic acid sequence coding a donor template nucleic acid, wherein the donor template nucleic acid comprises a U3 sequence, a U5 sequence and a donor template sequence. In one embodiment, the first CRISPR-Cas system guide RNA substantially hybridizes to a first DNA sequence and the second CRISPR-Cas system guide RNA substantially hybridizes to a second DNA sequence. In one embodiment, the first DNA sequence and second DNA sequence flank a target insertion region. In one embodiment, the system catalyzes the insertion of the donor template nucleic acid into the target insertion region.

[0263] In one embodiment, the system comprises, in one or more vectors, a nucleic acid sequence encoding a first fusion protein, wherein the first fusion protein comprises a retroviral integrase (IN), or a fragment thereof, a CRISPR-associated (Cas) protein, and a nuclear localization signal (NLS); a nucleic acid sequence coding a first CRISPR-Cas system guide RNA; a nucleic acid sequence encoding a second fusion protein, wherein the second fusion protein comprises a retroviral integrase (IN), or a fragment thereof, a CRISPR-associated (Cas) protein, and a nuclear localization signal (NLS); a nucleic acid sequence coding a first CRISPR-Cas system guide RNA; a nucleic acid sequence coding a second CRISPR-Cas system guide RNA; and a nucleic acid sequence coding a donor template nucleic acid, wherein the donor template nucleic acid comprises a U3 sequence, a U5 sequence and a donor template sequence.

[0264] In one embodiment, the first fusion protein and the second fusion protein are the same or are different. For example, in one embodiment, the first fusion protein comprises a HIV IN, or a fragment thereof, a dCas9 protein, and a NLS; and the second fusion protein comprises a BIV IN, or a fragment thereof, a Cpf1 Cas protein, and a NLS.

[0265] In one embodiment the U3 is specific to the retroviral IN of the first fusion protein and the U5 is specific to the retroviral IN of the second fusion protein. For example, in one embodiment, the first fusion protein comprises a HIV IN, or a fragment thereof, a dCas9 protein, and a NLS; the second fusion protein comprises a BIV IN, or a fragment thereof, a Cpf1 Cas protein, and a NLS; the U3 sequence is specific to HIV IN and the U5 sequence is specific to BIV IN.

[0266] In one embodiment, the first CRISPR-Cas system guide RNA substantially hybridizes to a first DNA sequence and the second CRISPR-Cas system guide RNA substantially hybridizes to a second DNA sequence. In one embodiment, the first DNA sequence and second DNA sequence flank a target insertion region. In one embodiment, the system catalyzes the insertion of the donor template nucleic acid into the target insertion region.

[0267] In one embodiment the system comprises a nucleic acid sequence encoding a fusion protein, wherein the fusion protein comprises a retroviral integrase (IN), or a fragment thereof, a CRISPR-associated (Cas) protein, and a nuclear localization signal (NLS); a CRISPR-Cas system guide RNA; a donor template nucleic acid, wherein the donor template nucleic acid comprises a U3 sequence, a U5 sequence and a donor template sequence.

[0268] In one embodiment, the nucleic acid sequence encoding a fusion protein, nucleic acid sequence coding a CRISPR-Cas system guide RNA, and the nucleic acid sequence coding a donor template nucleic acid are on the same or different vectors.

[0269] In one embodiment, nucleic acid sequence further comprises a promotor. In one embodiment, the promotor is a Ef1a2 promotor to drive the expression of a protein or gene described herein. In one embodiment, the promotor is Ef1a2 promotor is capable of driving expression in heart, skeletal muscle and neural tissues, such as brain and motor neurons. In one embodiment, the Ef1a2 promotor comprises a sequence at least 70%, at least 71%, at least 72%, at least 73%, at least 74%, at least 75%, at least 76%, at least 77%, at least 78%, at least 79%, 80%, at least 81%, at least 82%, at least 83%, at least 84%, at least 85%, at least 86%, at least 87%, at least 88%, at least 89%, 90%, at least 91%, at least 92%, at least 93%, at least 94%, at least 95%, at least 96%, at least 97%, at least 98%, or at least 99% identical to one of SEQ ID NOs: 333-335. In one embodiment, the Ef1a2 promotor comprises a sequence of one of SEQ ID NOs: 333-335.

[0270] In one embodiment, the nucleic acid sequence encoding a fusion protein encodes a fusion protein comprising a sequence at least 70%, at least 71%, at least 72%, at least 73%, at least 74%, at least 75%, at least 76%, at least 77%, at least 78%, at least 79%, 80%, at least 81%, at least 82%, at least 83%, at least 84%, at least 85%, at least 86%, at least 87%, at least 88%, at least 89%, 90%, at least 91%, at least 92%, at least 93%, at least 94%, at least 95%, at least 96%, at least 97%, at least 98%, or at least 99% identical to one of SEQ ID NOs:63-142. In one embodiment, the nucleic acid sequence encoding a fusion protein encodes a fusion protein comprising a sequence of one of SEQ ID NOs: 63-142.

[0271] In one embodiment, the nucleic acid sequence encoding a fusion protein comprises a nucleic acid sequence at least 70%, at least 71%, at least 72%, at least 73%, at least 74%, at least 75%, at least 76%, at least 77%, at least 78%, at least 79%, 80%, at least 81%, at least 82%, at least 83%, at least 84%, at least 85%, at least 86%, at least 87%, at least 88%, at least 89%, 90%, at least 91%, at least 92%, at least 93%, at least 94%, at least 95%, at least 96%, at least 97%, at least 98%, or at least 99% identical to one of SEQ ID NOs:211-250. In one embodiment, the nucleic acid sequence encoding a fusion protein comprises a nucleic acid sequence of one of SEQ ID NOs:211-250.

[0272] In one embodiment, the U3 sequence and U5 sequence are specific to the retroviral IN. For example, in one embodiment, the retroviral IN is HIV IN and the U3 sequence comprises a sequence at least 70%, at least 71%, at least 72%, at least 73%, at least 74%, at least 75%, at least 76%, at least 77%, at least 78%, at least 79%, 80%, at least 81%, at least 82%, at least 83%, at least 84%, at least 85%, at least 86%, at least 87%, at least 88%, at least 89%, 90%, at least 91%, at least 92%, at least 93%, at least 94%, at least 95%, at least 96%, at least 97%, at least 98%, or at least 99% identical to SEQ ID NO:258 and the U5 sequence comprises a sequence at least 70%, at least 71%, at least 72%, at least 73%, at least 74%, at least 75%, at least 76%, at least 77%, at least 78%, at least 79%, 80%, at least 81%, at least 82%, at least 83%, at least 84%, at least 85%, at least 86%, at least 87%, at least 88%, at least 89%, 90%, at least 91%, at least 92%, at least 93%, at least 94%, at least 95%, at least 96%, at least 97%, at least 98%, or at least 99% identical to SEQ ID NO:259.

[0273] In one embodiment, the retroviral IN is RSV IN and the U3 sequence comprises a sequence at least 70%, at least 71%, at least 72%, at least 73%, at least 74%, at least 75%, at least 76%, at least 77%, at least 78%, at least 79%, 80%, at least 81%, at least 82%, at least 83%, at least 84%, at least 85%, at least 86%, at least 87%, at least 88%, at least 89%, 90%, at least 91%, at least 92%, at least 93%, at least 94%, at least 95%, at least 96%, at least 97%, at least 98%, or at least 99% identical to SEQ ID NO:260 and the U5 sequence comprises a sequence at least 70%, at least 71%, at least 72%, at least 73%, at least 74%, at least 75%, at least 76%, at least 77%, at least 78%, at least 79%, 80%, at least 81%, at least 82%, at least 83%, at least 84%, at least 85%, at least 86%, at least 87%, at least 88%, at least 89%, 90%, at least 91%, at least 92%, at least 93%, at least 94%, at least 95%, at least 96%, at least 97%, at least 98%, or at least 99% identical to SEQ ID NO:261.

[0274] In one embodiment, the retroviral IN is HFV IN and the U3 sequence comprises a sequence at least 70%, at least 71%, at least 72%, at least 73%, at least 74%, at least 75%, at least 76%, at least 77%, at least 78%, at least 79%, 80%, at least 81%, at least 82%, at least 83%, at least 84%, at least 85%, at least 86%, at least 87%, at least 88%, at least 89%, 90%, at least 91%, at least 92%, at least 93%, at least 94%, at least 95%, at least 96%, at least 97%, at least 98%, or at least 99% identical to SEQ ID NO:262 and the U5 sequence comprises a sequence at least 70%, at least 71%, at least 72%, at least 73%, at least 74%, at least 75%, at least 76%, at least 77%, at least 78%, at least 79%, 80%, at least 81%, at least 82%, at least 83%, at least 84%, at least 85%, at least 86%, at least 87%, at least 88%, at least 89%, 90%, at least 91%, at least 92%, at least 93%, at least 94%, at least 95%, at least 96%, at least 97%, at least 98%, or at least 99% identical to SEQ ID NO:263.

[0275] In one embodiment, the retroviral IN is EIAV IN and the U3 sequence comprises a sequence at least 70%, at least 71%, at least 72%, at least 73%, at least 74%, at least 75%, at least 76%, at least 77%, at least 78%, at least 79%, 80%, at least 81%, at least 82%, at least 83%, at least 84%, at least 85%, at least 86%, at least 87%, at least 88%, at least 89%, 90%, at least 91%, at least 92%, at least 93%, at least 94%, at least 95%, at least 96%, at least 97%, at least 98%, or at least 99% identical to SEQ ID NO:264 and the U5 sequence comprises a sequence at least 70%, at least 71%, at least 72%, at least 73%, at least 74%, at least 75%, at least 76%, at least 77%, at least 78%, at least 79%, 80%, at least 81%, at least 82%, at least 83%, at least 84%, at least 85%, at least 86%, at least 87%, at least 88%, at least 89%, 90%, at least 91%, at least 92%, at least 93%, at least 94%, at least 95%, at least 96%, at least 97%, at least 98%, or at least 99% identical to SEQ ID NO:265.

[0276] In one embodiment, the retroviral IN is MoLV IN and the U3 sequence comprises a sequence at least 70%, at least 71%, at least 72%, at least 73%, at least 74%, at least 75%, at least 76%, at least 77%, at least 78%, at least 79%, 80%, at least 81%, at least 82%, at least 83%, at least 84%, at least 85%, at least 86%, at least 87%, at least 88%, at least 89%, 90%, at least 91%, at least 92%, at least 93%, at least 94%, at least 95%, at least 96%, at least 97%, at least 98%, or at least 99% identical to SEQ ID NO:266 and the U5 sequence comprises a sequence at least 70%, at least 71%, at least 72%, at least 73%, at least 74%, at least 75%, at least 76%, at least 77%, at least 78%, at least 79%, 80%, at least 81%, at least 82%, at least 83%, at least 84%, at least 85%, at least 86%, at least 87%, at least 88%, at least 89%, 90%, at least 91%, at least 92%, at least 93%, at least 94%, at least 95%, at least 96%, at least 97%, at least 98%, or at least 99% identical to SEQ ID NO:267.

[0277] In one embodiment, the retroviral IN is MMTV IN and the U3 sequence comprises a sequence at least 70%, at least 71%, at least 72%, at least 73%, at least 74%, at least 75%, at least 76%, at least 77%, at least 78%, at least 79%, 80%, at least 81%, at least 82%, at least 83%, at least 84%, at least 85%, at least 86%, at least 87%, at least 88%, at least 89%, 90%, at least 91%, at least 92%, at least 93%, at least 94%, at least 95%, at least 96%, at least 97%, at least 98%, or at least 99% identical to SEQ ID NO:268 and the U5 sequence comprises a sequence at least 70%, at least 71%, at least 72%, at least 73%, at least 74%, at least 75%, at least 76%, at least 77%, at least 78%, at least 79%, 80%, at least 81%, at least 82%, at least 83%, at least 84%, at least 85%, at least 86%, at least 87%, at least 88%, at least 89%, 90%, at least 91%, at least 92%, at least 93%, at least 94%, at least 95%, at least 96%, at least 97%, at least 98%, or at least 99% identical to SEQ ID NO:269.

[0278] In one embodiment, the retroviral IN is WDSV IN and the U3 sequence comprises a sequence at least 70%, at least 71%, at least 72%, at least 73%, at least 74%, at least 75%, at least 76%, at least 77%, at least 78%, at least 79%, 80%, at least 81%, at least 82%, at least 83%, at least 84%, at least 85%, at least 86%, at least 87%, at least 88%, at least 89%, 90%, at least 91%, at least 92%, at least 93%, at least 94%, at least 95%, at least 96%, at least 97%, at least 98%, or at least 99% identical to SEQ ID NO:270 and the U5 sequence comprises a sequence at least 70%, at least 71%, at least 72%, at least 73%, at least 74%, at least 75%, at least 76%, at least 77%, at least 78%, at least 79%, 80%, at least 81%, at least 82%, at least 83%, at least 84%, at least 85%, at least 86%, at least 87%, at least 88%, at least 89%, 90%, at least 91%, at least 92%, at least 93%, at least 94%, at least 95%, at least 96%, at least 97%, at least 98%, or at least 99% identical to SEQ ID NO:271.

[0279] In one embodiment, the retroviral IN is BLV IN and the U3 sequence comprises a sequence at least 70%, at least 71%, at least 72%, at least 73%, at least 74%, at least 75%, at least 76%, at least 77%, at least 78%, at least 79%, 80%, at least 81%, at least 82%, at least 83%, at least 84%, at least 85%, at least 86%, at least 87%, at least 88%, at least 89%, 90%, at least 91%, at least 92%, at least 93%, at least 94%, at least 95%, at least 96%, at least 97%, at least 98%, or at least 99% identical to SEQ ID NO:272 and the U5 sequence comprises a sequence at least 70%, at least 71%, at least 72%, at least 73%, at least 74%, at least 75%, at least 76%, at least 77%, at least 78%, at least 79%, 80%, at least 81%, at least 82%, at least 83%, at least 84%, at least 85%, at least 86%, at least 87%, at least 88%, at least 89%, 90%, at least 91%, at least 92%, at least 93%, at least 94%, at least 95%, at least 96%, at least 97%, at least 98%, or at least 99% identical to SEQ ID NO:273.

[0280] In one embodiment, the retroviral IN is SIV IN and the U3 sequence comprises a sequence at least 70%, at least 71%, at least 72%, at least 73%, at least 74%, at least 75%, at least 76%, at least 77%, at least 78%, at least 79%, 80%, at least 81%, at least 82%, at least 83%, at least 84%, at least 85%, at least 86%, at least 87%, at least 88%, at least 89%, 90%, at least 91%, at least 92%, at least 93%, at least 94%, at least 95%, at least 96%, at least 97%, at least 98%, or at least 99% identical to SEQ ID NO:274 and the U5 sequence comprises a sequence at least 70%, at least 71%, at least 72%, at least 73%, at least 74%, at least 75%, at least 76%, at least 77%, at least 78%, at least 79%, 80%, at least 81%, at least 82%, at least 83%, at least 84%, at least 85%, at least 86%, at least 87%, at least 88%, at least 89%, 90%, at least 91%, at least 92%, at least 93%, at least 94%, at least 95%, at least 96%, at least 97%, at least 98%, or at least 99% identical to SEQ ID NO:275.

[0281] In one embodiment, the retroviral IN is FIV IN and the U3 sequence comprises a sequence at least 70%, at least 71%, at least 72%, at least 73%, at least 74%, at least 75%, at least 76%, at least 77%, at least 78%, at least 79%, 80%, at least 81%, at least 82%, at least 83%, at least 84%, at least 85%, at least 86%, at least 87%, at least 88%, at least 89%, 90%, at least 91%, at least 92%, at least 93%, at least 94%, at least 95%, at least 96%, at least 97%, at least 98%, or at least 99% identical to SEQ ID NO:276 and the U5 sequence comprises a 70%, at least 71%, at least 72%, at least 73%, at least 74%, at least 75%, at least 76%, at least 77%, at least 78%, at least 79%, 80%, at least 81%, at least 82%, at least 83%, at least 84%, at least 85%, at least 86%, at least 87%, at least 88%, at least 89%, 90%, at least 91%, at least 92%, at least 93%, at least 94%, at least 95%, at least 96%, at least 97%, at least 98%, or at least 99% identical to SEQ ID NO:277.

[0282] In one embodiment, the retroviral IN is BIV IN and the U3 sequence comprises a sequence at least 70%, at least 71%, at least 72%, at least 73%, at least 74%, at least 75%, at least 76%, at least 77%, at least 78%, at least 79%, 80%, at least 81%, at least 82%, at least 83%, at least 84%, at least 85%, at least 86%, at least 87%, at least 88%, at least 89%, 90%, at least 91%, at least 92%, at least 93%, at least 94%, at least 95%, at least 96%, at least 97%, at least 98%, or at least 99% identical to SEQ ID NO:278 and the U5 sequence comprises a sequence at least 70%, at least 71%, at least 72%, at least 73%, at least 74%, at least 75%, at least 76%, at least 77%, at least 78%, at least 79%, 80%, at least 81%, at least 82%, at least 83%, at least 84%, at least 85%, at least 86%, at least 87%, at least 88%, at least 89%, 90%, at least 91%, at least 92%, at least 93%, at least 94%, at least 95%, at least 96%, at least 97%, at least 98%, or at least 99% identical to SEQ ID NO:279.

[0283] In one embodiment, the IN is TY1 and the U3 sequence comprises a sequence at least 70%, at least 71%, at least 72%, at least 73%, at least 74%, at least 75%, at least 76%, at least 77%, at least 78%, at least 79%, 80%, at least 81%, at least 82%, at least 83%, at least 84%, at least 85%, at least 86%, at least 87%, at least 88%, at least 89%, 90%, at least 91%, at least 92%, at least 93%, at least 94%, at least 95%, at least 96%, at least 97%, at least 98%, or at least 99% identical to SEQ ID NO:280 and the U5 sequence comprises a sequence at least 70%, at least 71%, at least 72%, at least 73%, at least 74%, at least 75%, at least 76%, at least 77%, at least 78%, at least 79%, 80%, at least 81%, at least 82%, at least 83%, at least 84%, at least 85%, at least 86%, at least 87%, at least 88%, at least 89%, 90%, at least 91%, at least 92%, at least 93%, at least 94%, at least 95%, at least 96%, at least 97%, at least 98%, or at least 99% identical to SEQ ID NO:281.

[0284] In one embodiment, the IN is InsF IN and the U3 sequence is a IS3 IRL sequence and the U5 sequence is a IS3 IRR sequence. In one embodiment, the IN is InsF IN and the U3 sequence comprises a sequence at least 70%, at least 71%, at least 72%, at least 73%, at least 74%, at least 75%, at least 76%, at least 77%, at least 78%, at least 79%, 80%, at least 81%, at least 82%, at least 83%, at least 84%, at least 85%, at least 86%, at least 87%, at least 88%, at least 89%, 90%, at least 91%, at least 92%, at least 93%, at least 94%, at least 95%, at least 96%, at least 97%, at least 98%, or at least 99% identical to SEQ ID NO:282 and the U5 sequence comprises a sequence at least 70%, at least 71%, at least 72%, at least 73%, at least 74%, at least 75%, at least 76%, at least 77%, at least 78%, at least 79%, 80%, at least 81%, at least 82%, at least 83%, at least 84%, at least 85%, at least 86%, at least 87%, at least 88%, at least 89%, 90%, at least 91%, at least 92%, at least 93%, at least 94%, at least 95%, at least 96%, at least 97%, at least 98%, or at least 99% identical to SEQ ID NO:283.

[0285] The systems and vectors can be designed for expression of CRISPR transcripts (e.g. nucleic acid transcripts, proteins, or enzymes) in prokaryotic or eukaryotic cells. For example, CRISPR transcripts can be expressed in bacterial cells such as Escherichia coli, insect cells (using baculovirus expression vectors), yeast cells, or mammalian cells. Suitable host cells are discussed further in Goeddel, Gene Expression Technology: Methods in Enzymology 185, Academic Press, San Diego, Calif. (1990). Alternatively, the recombinant expression vector systems can be transcribed and translated in vitro, for example using T7 promoter regulatory sequences and T7 polymerase.

[0286] Vectors may be introduced and propagated in a prokaryote. In some embodiments, a prokaryote is used to amplify copies of a vector to be introduced into a eukaryotic cell or as an intermediate vector in the production of a vector to be introduced into a eukaryotic cell (e.g. amplifying a plasmid as part of a viral vector packaging system). In some embodiments, a prokaryote is used to amplify copies of a vector and express one or more nucleic acids, such as to provide a source of one or more proteins for delivery to a host cell or host organism. Expression of proteins in prokaryotes is most often carried out in Escherichia coli with vectors containing constitutive or inducible promoters directing the expression of either fusion or non-fusion proteins. Fusion vectors add a number of amino acids to a protein encoded therein, such as to the amino terminus of the recombinant protein. Such fusion vectors may serve one or more purposes, such as: (i) to increase expression of recombinant protein; (ii) to increase the solubility of the recombinant protein; and (iii) to aid in the purification of the recombinant protein by acting as a ligand in affinity purification. Often, in fusion expression vectors, a proteolytic cleavage site is introduced at the junction of the fusion moiety and the recombinant protein to enable separation of the recombinant protein from the fusion moiety subsequent to purification of the fusion protein. Such enzymes, and their cognate recognition sequences, include Factor Xa, thrombin and enterokinase. Example fusion expression vectors include pGEX (Pharmacia Biotech Inc; Smith and Johnson, 1988. Gene 67: 31-40), pMAL (New England Biolabs, Beverly, Mass.) and pRIT5 (Pharmacia, Piscataway, N.J.) that fuse glutathione S-transferase (GST), maltose E binding protein, or protein A. respectively, to the target recombinant protein.

[0287] Examples of suitable inducible non-fusion E. coli expression vectors include pTrc (Amrann et al., (1988) Gene 69:301-315) and pET 11d (Studier et al., Gene Expression Technology: Methods in Enzymology 185, Academic Press, San Diego, Calif. (1990) 60-89).

[0288] In some embodiments, a vector is a yeast expression vector. Examples of vectors for expression in yeast Saccharomyces cerivisae include pYepSec1 (Baldari, et al., 1987. EMBO J. 6: 229-234), pMFa (Kuijan and Herskowitz, 1982. Cell 30: 933-943), pJRY88 (Schultz et al., 1987. Gene 54: 113-123), pYES2 (Invitrogen Corporation, San Diego, Calif.), and picZ (InVitrogen Corp, San Diego, Calif.).

[0289] In some embodiments, a vector drives protein expression in insect cells using baculovirus expression vectors. Baculovirus vectors available for expression of proteins in cultured insect cells (e.g., SF9 cells) include the pAc series (Smith, et al., 1983. Mol. Cell. Biol. 3: 2156-2165) and the pVL series (Lucklow and Summers, 1989. Virology 170: 31-39).

[0290] In some embodiments, a vector is capable of driving expression of one or more sequences in mammalian cells using a mammalian expression vector. Examples of mammalian expression vectors include pCDM8 (Seed, 1987. Nature 329: 840) and pMT2PC (Kaufman, et al., 1987. EMBO J. 6: 187-195). When used in mammalian cells, the expression vector's control functions are typically provided by one or more regulatory elements. For example, commonly used promoters are derived from polyoma, adenovirus 2, cytomegalovirus, simian virus 40, and others disclosed herein and known in the art. For other suitable expression systems for both prokaryotic and eukaryotic cells see, e.g., Chapters 16 and 17 of Sambrook, et al., Molecular Cloning: A Laboratory Manual 2nd ed., Cold Spring Harbor Laboratory, Cold Spring Harbor Laboratory Press, Cold Spring Harbor, N.Y., 1989.

[0291] In some embodiments, the recombinant mammalian expression vector is capable of directing expression of the nucleic acid preferentially in a particular cell type (e.g., tissue-specific regulatory elements are used to express the nucleic acid). Tissue-specific regulatory elements are known in the art. Non-limiting examples of suitable tissue-specific promoters include the albumin promoter (liver-specific; Pinkert, et al., 1987. Genes Dev. 1: 268-277), lymphoid-specific promoters (Calame and Eaton, 1988. Adv. Immunol. 43: 235-275), in particular promoters of T cell receptors (Winoto and Baltimore, 1989. EMBO J. 8: 729-733) and immunoglobulins (Baneiji, et al., 1983. Cell 33: 729-740; Queen and Baltimore, 1983. Cell 33: 741-748), neuron-specific promoters (e.g., the neurofilament promoter; Byrne and Ruddle, 1989. Proc. Natl. Acad. Sci. USA 86: 5473-5477), pancreas-specific promoters (Edlund, et al., 1985. Science 230: 912-916), and mammary gland-specific promoters (e.g., milk whey promoter; U.S. Pat. No. 4,873,316 and European Application Publication No. 264,166). Developmentally-regulated promoters are also encompassed, e.g., the murine hox promoters (Kessel and Gruss, 1990. Science 249: 374-379) and the α-fetoprotein promoter (Campes and Tilghman, 1989. Genes Dev. 3: 537-546).

[0292] In some embodiments, a regulatory element is operably linked to one or more elements of a CRISPR system so as to drive expression of the one or more elements of the CRISPR system. In general, CRISPRs (Clustered Regularly Interspaced Short Palindromic Repeats), also known as SPIDRs (SPacer Interspersed Direct Repeats), constitute a family of DNA loci that are usually specific to a particular bacterial species. The CRISPR locus comprises a distinct class of interspersed short sequence repeats (SSRs) that were recognized in E. coli(Ishino et al., J. Bacteriol., 169:5429-5433 [1987]; and Nakata et al., J. Bacteriol., 171:3553-3556 [1989]), and associated genes. Similar interspersed SSRs have been identified in Haloferax mediterranei, Streptococcus pyogenes, Anabaena, and Mycobacterium tuberculosis (See, Groenen et al., Mol. Microbiol., 10:1057-1065 [1993]; Hoe et al., Emerg. Infect. Dis., 5:254-263 [1999]; Masepohl et al., Biochim. Biophys. Acta 1307:26-30 [1996]; and Mojica et al., Mol. Microbiol., 17:85-93 [1995]). The CRISPR loci typically differ from other SSRs by the structure of the repeats, which have been termed short regularly spaced repeats (SRSRs) (Janssen et al., OMICS J. Integ. Biol., 6:23-33 [2002]; and Mojica et al., Mol. Microbiol., 36:244-246 [2000]). In general, the repeats are short elements that occur in clusters that are regularly spaced by unique intervening sequences with a substantially constant length (Mojica et al., [2000], supra). Although the repeat sequences are highly conserved between strains, the number of interspersed repeats and the sequences of the spacer regions typically differ from strain to strain (van Embden et al., J. Bacteriol., 182:2393-2401 [2000]). CRISPR loci have been identified in more than 40 prokaryotes (See e.g., Jansen et al., Mol. Microbiol., 43:1565-1575 [2002]; and Mojica et al., [2005]) including, but not limited to Aeropyrum, Pyrobaculum, Sulfolobus, Archaeoglobus, Halocarcula, Methanobacteriumn, Methanococcus, Methanosarcina, Methanopyrus, Pyrococcus, Picrophilus, Thernioplasnia, Corynebacterium, Mycobacterium, Streptomyces, Aquifrx, Porphvromonas, Chlorobium, Thermus, Bacillus, Listeria, Staphylococcus, Clostridium, Thermoanaerobacter, Mycoplasma, Fusobacterium, Azarcus, Chromobacterium, Neisseria, Nitrosomonas, Desulfovibrio, Geobacter, Myrococcus, Campylobacter, Wolinella, Acinetobacter, Erwinia, Escherichia, Legionella, Methylococcus, Pasteurella, Photobacterium, Salmonella, Xanthomonas, Yersinia, Treponema, and Thermotoga.

### Methods of Editing and Delivering Nucleic Acids

[0293] In one embodiment, the present disclosure provides methods of editing genetic material, such as nucleic acid molecule, a genome or, a gene. For example, in one embodiment, editing is integration. In one embodiment, editing is CIRSPR-mediated editing.

[0294] In one embodiment, the method comprises administering to the genetic material: a nucleic acid molecule encoding a fusion protein; a guide nucleic acid comprising a targeting nucleotide sequence complimentary to a target region in the genetic material; and a donor template nucleic acid comprising a U3 sequence, a U5 sequence and a donor template sequence. In one embodiment, the method comprises administering to the genetic material: a fusion protein; a guide nucleic acid comprising a targeting nucleotide sequence complimentary to a target region in the genetic material; and a donor template nucleic acid comprising a U3 sequence, a U5 sequence and a donor template sequence. In one embodiment, the method is and in vitro method or an in vivo method.

[0295] In one embodiment, the present disclosure provides methods of delivering a nucleic acid sequence to genetic material. In one embodiment, the method comprises administering to the gene: a nucleic acid molecule encoding a fusion protein; a guide nucleic acid comprising a targeting nucleotide sequence complimentary to a target region in the gene; and a donor template nucleic acid comprising a U3 sequence, a U5 sequence and a donor template sequence. In one embodiment, the method comprises administering to the genetic material: a fusion protein; a guide nucleic acid comprising a targeting nucleotide sequence complimentary to a target region in the genetic material; and a donor template nucleic acid comprising a U3 sequence, a U5 sequence and a donor template sequence. In one embodiment, the method is and in vitro method or an in vivo method.

[0296] In one embodiment, the method comprises administering to a cell a nucleic acid molecule encoding a fusion protein; a guide nucleic acid comprising a targeting nucleotide sequence complimentary to a target region in the gene; and a donor template nucleic acid comprising a U3 sequence, a U5 sequence and a donor template sequence. In one embodiment, the method comprises administering to a cell a fusion protein; a guide nucleic acid comprising a targeting nucleotide sequence complimentary to a target region in the gene; and a donor template nucleic acid comprising a U3 sequence, a U5 sequence and a donor template sequence.

[0297] In one embodiment, the method of editing genetic material is a method of editing a gene. In one embodiment, the gene is located in the genome of the cell. In one embodiment, the method of editing genetic material is a method of editing a nucleic acid.

[0298] In one embodiment, the disclosure provides methods of inserting a donor template sequence into a target sequence. In one embodiment, the method inserts a donor template sequence into a target sequence in a cell. In one embodiment, the method comprises administering to the cell a nucleic acid molecule encoding a fusion protein; a guide nucleic acid comprising a targeting nucleotide sequence complimentary to a region in the target sequence; and a donor template nucleic acid comprising a U3 sequence, a U5 sequence and the donor template sequence. In one embodiment, the method comprises administering to the cell a fusion protein; a guide nucleic acid comprising a targeting nucleotide sequence complimentary to a region in the target sequence; and a donor template nucleic acid comprising a U3 sequence, a U5 sequence and the donor template sequence.

[0299] Targeted delivery of large DNA sequences for genome editing using CRISPR-Cas9 mediated HDR remains inefficient. However, the present disclosure provides methods for inserting a large donor template sequence into a target sequence in a cell. In one embodiment the method inserts donor template sequence at least 1 kb or more, at least 2 kb or more, at least 3 kb or more, at least 4 kb or more, at least 5 kb or more, at least 6 kb or more, at least 7 kb or more, at least 8 kb or more, at least 9 kb or more, at least 10 kb or more, at least 11 kb or more, at least 12 kb or more, at least 13 kb or more, at least 14 kb or more, at least 15 kb or more, at least 16 kb or more, at least 17 kb or more, or at least 18 kb or more. In one embodiment, the method comprises administering to the cell a fusion protein or a nucleic acid molecule encoding a fusion protein; a guide nucleic acid comprising a targeting nucleotide sequence complimentary to a region in the target sequence; and a donor template nucleic acid comprising a U3 sequence, a U5 sequence and the donor template sequence.

[0300] In one embodiment, the target sequence is located within a gene. In one embodiment, the donor template sequence disrupts the sequence of a gene thereby inhibiting or reducing the expression of the gene. In one embodiment, target sequence has a mutation and the donor template sequence inserts a corrected sequence into the target sequence, thereby correcting the gene mutation. In one embodiment, the donor template sequence is a gene sequence and inserting the donor template sequence into a target sequence in a cell allows for expression of the gene.

[0301] In one embodiment, the donor template sequence is inserted into a safe harbor site. Thus, in one embodiment, the guide nucleic acid comprising a nucleotide sequence complimentary to a safe harbor region in the gene. Safe harbor regions allow for expression of a therapeutic gene without affecting neighbor gene expression. Safe harbor regions may include intergenic regions apart from neighbor genes ex. H11, or within ‘non-essential’ genes, ex. CCR5, hROSA26 or AAVS1. Exemplary safe harbor regions and guide nucleic acid sequences complementary to these sequences can be found, for example in Pellenz et al., New Human Chromosomal Sites with “Safe Harbor” Potential for Targeted Transgene Insertion, 2019, Hum Gene Ther 30(7):814-28, which is herein incorporated by reference.

[0302] In one embodiment, the donor template sequence is inserted into a 3′ untranslated region (UTR) allowing the expression of the donor template sequence to be controlled by the the promoters of other genes.

[0303] In one embodiment, the nucleic acid molecule comprises a nucleic acid sequence encoding a CRISPR-associated (Cas) protein; and a nucleic acid sequence encoding a nuclear localization signal (NLS).

[0304] In one embodiment, the nucleic acid molecule comprises a nucleic acid sequence encoding a retroviral integrase (IN), or a fragment thereof; a nucleic acid sequence encoding a CRISPR-associated (Cas) protein; and a nucleic acid sequence encoding a nuclear localization signal (NLS).

[0305] In one embodiment, the retroviral IN is human immunodeficiency virus (HIV) IN, Rous sarcoma virus (RSV) IN, Mouse mammary tumor virus (MMTV) IN, Moloney murine leukemia virus (MoLV) IN, bovine leukemia virus (BLV) IN, Human T-lymphotropic virus (HTLV) IN, avian sarcoma leukosis virus (ASLV) IN, feline leukemia virus (FLV) IN, xenotropic murine leukemia virus-related virus (XMLV) IN, simian immunodeficiency virus (SIV) IN, feline immunodeficiency virus (FIV) IN, equine infectious anemia virus (EIAV) IN, Prototype foamy virus (PFV) IN, simian foamy virus (SFV) IN, human foamy virus (HFV) IN, walleye dermal sarcoma virus (WDSV) IN, or bovine immunodeficiency virus (BIV) IN.

[0306] In one embodiment, the retroviral IN is HIV IN. In one embodiment, the HIV IN comprises one or more amino acid substitutions, wherein the substitution improves catalytic activity, improves solubility, or increases interaction with one or more host cellular cofactors. In one embodiment, HIV IN comprises one or more amino acid substitutions selected from the group consisting of E85G, E85F, D116N, F185K, C280S, T97A, Y134R, G140S, and Q148H. In one embodiment, HIV IN comprises amino acid substitutions F185K and C280S. In one embodiment, HIV IN comprises amino acid substitutions T97A and Y134R. In one embodiment, HIV IN comprises amino acid substitutions G140S and Q148H.

[0307] In one embodiment, the retroviral IN fragment comprises the IN N-terminal domain (NTD), and the IN catalytic core domain (CCD). In one embodiment, the retroviral IN fragment comprises the IN CCD and the IN C-terminal domain (CTD). In one embodiment, the retroviral IN fragment comprises the IN NTD. In one embodiment, the retroviral IN fragment comprises the IN CCD. In one embodiment, the retroviral IN fragment comprises the IN CTD.

[0308] In one embodiment, the nucleic acid sequence encoding a retroviral IN encodes an amino acid sequence at least 70%, at least 71%, at least 72%, at least 73%, at least 74%, at least 75%, at least 76%, at least 77%, at least 78%, at least 79%, 80%, at least 81%, at least 82%, at least 83%, at least 84%, at least 85%, at least 86%, at least 87%, at least 88%, at least 89%, 90%, at least 91%, at least 92%, at least 93%, at least 94%, at least 95%, at least 96%, at least 97%, at least 98%, or at least 99% identical to one of SEQ ID NOs:9-48. In one embodiment, the nucleic acid sequence encoding a retroviral IN encodes an amino acid sequence of one of SEQ ID NOs: 9-48.

[0309] In one embodiment, the nucleic acid sequence encoding a retroviral IN comprises a nucleic acid sequence at least 70%, at least 71%, at least 72%, at least 73%, at least 74%, at least 75%, at least 76%, at least 77%, at least 78%, at least 79%, 80%, at least 81%, at least 82%, at least 83%, at least 84%, at least 85%, at least 86%, at least 87%, at least 88%, at least 89%, 90%, at least 91%, at least 92%, at least 93%, at least 94%, at least 95%, at least 96%, at least 97%, at least 98%, or at least 99% identical to one of SEQ ID NOs:161-200. In one embodiment, the nucleic acid sequence encoding a retroviral IN comprises a nucleic acid sequence of one of SEQ ID NOs: 161-200.

[0310] In one embodiment, the Cas protein is Cas9, Cas13, Cas14, or Cpf1. In one embodiment, the Cas protein is catalytically deficient (dCas).

[0311] In one embodiment, the nucleic acid sequence encoding a Cas protein comprises a sequence encoding an amino acid sequence at least 70%, at least 71%, at least 72%, at least 73%, at least 74%, at least 75%, at least 76%, at least 77%, at least 78%, at least 79%, 80%, at least 81%, at least 82%, at least 83%, at least 84%, at least 85%, at least 86%, at least 87%, at least 88%, at least 89%, 90%, at least 91%, at least 92%, at least 93%, at least 94%, at least 95%, at least 96%, at least 97%, at least 98%, or at least 99% identical to one of SEQ ID NOs: 1-8. In one embodiment, the nucleic acid sequence encoding a Cas protein comprising a sequence encoding one of SEQ ID NOs:1-8.

[0312] In one embodiment, the nucleic acid sequence encoding a Cas protein comprises a nucleic acid at least 70%, at least 71%, at least 72%, at least 73%, at least 74%, at least 75%, at least 76%, at least 77%, at least 78%, at least 79%, 80%, at least 81%, at least 82%, at least 83%, at least 84%, at least 85%, at least 86%, at least 87%, at least 88%, at least 89%, 90%, at least 91%, at least 92%, at least 93%, at least 94%, at least 95%, at least 96%, at least 97%, at least 98%, or at least 99% identical to one of SEQ ID NOs:153-160. In one embodiment, the nucleic acid sequence encoding a Cas protein comprises a nucleic acid sequence of one of SEQ ID NOs: 153-160.

[0313] In one embodiment, the NLS is a retrotransposon NLS. In one embodiment, the NLS is derived from yeast GAL4, SKI3, L29 or histone H2B proteins, polyoma virus large T protein, VP1 or VP2 capsid protein, SV40 VP1 or VP2 capsid protein, Adenovirus E1 a or DBP protein, influenza virus NS1 protein, hepatitis vims core antigen or the mammalian lamin, c-myc, max, c-myb, p53, c-erbA, jun, Tax, steroid receptor or Mx proteins, or simian vims 40 (“SV40”) T-antigen. In one embodiment, the NLS is a Ty1 or Ty1-derived NLS, a Ty2 or Ty2-derived NLS or a MAK11 or MAK11-derived NLS. In one embodiment, the Ty1 NLS comprises an amino acid sequence of SEQ ID NO:53. In one embodiment, the Ty2 NLS comprises an amino acid sequence of SEQ ID NO:54. In one embodiment, the MAK11 NLS comprises an amino acid sequence of SEQ ID NO:56.

[0314] In one embodiment, nucleic acid sequence encoding a NLS comprises a nucleic acid sequence encoding at least 70%, at least 71%, at least 72%, at least 73%, at least 74%, at least 75%, at least 76%, at least 77%, at least 78%, at least 79%, 80%, at least 81%, at least 82%, at least 83%, at least 84%, at least 85%, at least 86%, at least 87%, at least 88%, at least 89%, 90%, at least 91%, at least 92%, at least 93%, at least 94%, at least 95%, at least 96%, at least 97%, at least 98%, or at least 99% identical to one of SEQ ID NOs:49-62 and 361-973. In one embodiment, nucleic acid sequence encoding a NLS comprises a nucleic acid sequence encoding one of SEQ ID NOs: 49-62 and 361-973.

[0315] In one embodiment, nucleic acid sequence encoding a NLS comprises a nucleic acid sequence at least 70%, at least 71%, at least 72%, at least 73%, at least 74%, at least 75%, at least 76%, at least 77%, at least 78%, at least 79%, 80%, at least 81%, at least 82%, at least 83%, at least 84%, at least 85%, at least 86%, at least 87%, at least 88%, at least 89%, 90%, at least 91%, at least 92%, at least 93%, at least 94%, at least 95%, at least 96%, at least 97%, at least 98%, or at least 99% identical to one of SEQ ID NOs:201-210. In one embodiment, nucleic acid sequence encoding a NLS comprises a nucleic acid sequence of one of SEQ ID NOs:201-210.

[0316] In one embodiment, the nucleic acid molecule encodes a fusion protein comprising a sequence at least 70%, at least 71%, at least 72%, at least 73%, at least 74%, at least 75%, at least 76%, at least 77%, at least 78%, at least 79%, 80%, at least 81%, at least 82%, at least 83%, at least 84%, at least 85%, at least 86%, at least 87%, at least 88%, at least 89%, 90%, at least 91%, at least 92%, at least 93%, at least 94%, at least 95%, at least 96%, at least 97%, at least 98%, or at least 99% identical to one of SEQ ID NOs:63-146. In one embodiment, the nucleic acid molecule encodes a fusion protein comprising a sequence of one of SEQ ID NOs: 63-146.

[0317] In one embodiment, the nucleic acid molecule comprises a nucleic acid sequence at least 70%, at least 71%, at least 72%, at least 73%, at least 74%, at least 75%, at least 76%, at least 77%, at least 78%, at least 79%, 80%, at least 81%, at least 82%, at least 83%, at least 84%, at least 85%, at least 86%, at least 87%, at least 88%, at least 89%, 90%, at least 91%, at least 92%, at least 93%, at least 94%, at least 95%, at least 96%, at least 97%, at least 98%, or at least 99% identical to one of SEQ ID NOs:211-254. In one embodiment, the nucleic acid molecule comprises a nucleic acid sequence of one of SEQ ID NOs: 211-254.

[0318] In one embodiment, the U3 sequence and U5 sequence are specific to the retroviral IN.

[0319] In some embodiments, the gene is any target gene of interest. For example in one embodiment, the gene is any gene associated an increase in the risk of having or developing a disease. In some embodiments, the method comprises introducing the nucleic acid molecule encoding a fusion protein; the guide nucleic acid comprising a targeting nucleotide sequence complimentary to a target region in the gene; and the donor template nucleic acid comprising a U3 sequence, a U5 sequence and a donor template sequence. In one embodiment, the IN-Cas fusion protein binds to a target polynucleotide to effect cleavage of the target polynucleotide within the gene. In one embodiment, the IN-Cas fusion protein is complexed with the guide nucleic acid that is hybridized to the target sequence within the target polynucleotide. In one embodiment, the IN-Cas fusion protein is complexed with the nucleic acid sequence coding a donor template nucleic acid. In one embodiment, the IN-Cas fusion protein is complexed with the nucleic acid sequence coding a guide nucleic acid. In one embodiment, the IN-Cas fusion protein is complexed with the nucleic acid sequence coding a guide nucleic acid and the nucleic acid sequence coding a donor template nucleic acid. In one embodiment, the IN-Cas fusion protein is complexed with the guide nucleic acid that is hybridized to the target sequence within the target polynucleotide and the donor template nucleic acid. In one embodiment, the IN-Cas fusion protein is complexed with the donor template nucleic acid. In one embodiment, the IN-Cas fusion protein is complexed with the guide nucleic acid. In one embodiment, the IN-Cas fusion protein is complexed with the guide nucleic acid and the donor template nucleic acid.

[0320] In some embodiments, the IN-Cas catalyzes the integration of the donor template into to the gene. In one embodiment, the integration introduces one or more mutations into the gene. In some embodiments, said mutation results in one or more amino acid changes in a protein expression from a gene comprising the target sequence.

[0321] In one embodiment, the IN-mediated integration of DNA sequences can occur in either direction in a target DNA sequence. In one embodiment, different combinations of Cas and IN retroviral class proteins are used to promote direction editing. For example, in one embodiment, a fusion of IN from a retroviral class is bound to a first catalytically dead Cas allowing for binding to a specific target sequence utilizing the Cas-specific guide-RNA. In one embodiment, the donor sequence comprises both HIV and BIV LTR sequences. Thus, in one embodiment, the sequence is integrated in a single orientation with the target DNA.

[0322] In one embodiment, flanking LoxP (Floxed) sequences are incorporated around a gene of interest. Including floxed sequences allows for CRE-mediated recombination and conditional mutagenesis. Current methods to generate Floxed alleles using CRISPR-Cas9 are inefficient. The most widely utilized approach is to use two guide-RNAs to induce DNA cleavage at flanking target sequences and Homology Direct Repair to insert ssDNA templates containing LoxP sequences. However, when using double sgRNAs to induce cleavage, the most favorable reaction is the deletion of intervening sequence, resulting in global gene deletion. Thus, in one embodiment, the use of Integrase-Cas-mediated gene insertion increases the efficiency of tandem insertion of DNA sequences. In one embodiment, the integration of a sequence containing inverted LoxP sequences allows for recombination of flanking LoxP sequences because IN-mediated integration may occur in either direction.

### Methods of Treatment and Use

[0323] In one aspect, the present disclosure provides a method of treating, reducing the symptoms of, and/or reducing the risk of developing Friedreich's Ataxia. Friedreich's Ataxia is an autosomal-recessive genetic disease that causes difficulty walking, a loss of sensation in the arms and legs, and impaired speech that worsens over time. Symptoms generally start between 5 and 20 years of age. Many develop hypertrophic cardiomyopathy and require a mobility aid such as a cane, walker, or wheelchair in their teens. As the disease progresses, people lose their sight and hearing. Other complications include scoliosis and diabetes mellitus. The condition is caused by mutations in the FXN gene on chromosome 9, which makes a protein called frataxin. In 98% of cases, the mutant FXN gene has 90-1,300 GAA trinucleotide repeat expansions in intron 1 of both alleles, in the rest 2%, the mutant FXN gene has point mutations within the FXN gene. The GAA expansion causes epigenetic changes and formation of heterochromatin near the repeat. The length of the shorter GAA repeat is correlated with the age of onset and disease severity. The formation of heterochromatin results in reduced transcription of the gene and low levels of frataxin. People with Friedreich's Ataxia might have 5-35% of the frataxin protein compared to healthy individuals. Heterozygous carriers of the mutant FXN gene have 50% lower frataxin levels, but this decrease is not enough to cause symptoms.

[0324] In one embodiment, the method comprises administering a fusion protein of the disclosure or a nucleic acid molecule encoding a fusion protein of the disclosure; a guide nucleic acid comprising a targeting nucleotide sequence complimentary to a target region in a target nucleic acid; and a donor template nucleic acid comprising a U3 sequence, a U5 sequence. In one embodiment, the method further comprises administering a donor template sequence. In one embodiment, the target nucleic acid is a safe harbor site.

[0325] Safe harbor regions allow for expression of a therapeutic gene without affecting neighbor gene expression. Safe harbor regions may include intergenic regions apart from neighbor genes ex. H11, or within ‘non-essential’ genes, ex. CCR5, hROSA26 or AAVS1. Exemplary safe harbor regions and guide nucleic acid sequences complementary to these sequences can be found, for example in Pellenz et al., New Human Chromosomal Sites with “Safe Harbor” Potential for Targeted Transgene Insertion, 2019, Hum Gene Ther 30(7):814-28, which is herein incorporated by reference.

[0326] In one embodiment, the target region is within the FXN gene, and the donor template is the wild type FXN gene or a fragment thereof. At the target region, through the action of the fusion protein, the wild type FXN gene or a fragment thereof is integrated into the FXN gene and corrects the mutation(s) in the FXN gene, which consequently reverses the FXN expression to normal level and improves Friedreich's Ataxia conditions.

[0327] In one embodiment, the donor template comprises the wild type FXN gene or a fragment thereof. In one embodiment, the donor template comprises a nucleic acid sequence encoding wild-type frataxin, or a fragment thereof. In one embodiment, donor template nucleic acid encodes a protein having at least 70%, at least 71%, at least 72%, at least 73%, at least 74%, at least 75%, at least 76%, at least 77%, at least 78%, at least 79%, 80%, at least 81%, at least 82%, at least 83%, at least 84%, at least 85%, at least 86%, at least 87%, at least 88%, at least 89%, 90%, at least 91%, at least 92%, at least 93%, at least 94%, at least 95%, at least 96%, at least 97%, at least 98%, or at least 99% homology to SEQ ID NO:357. In one embodiment, donor template nucleic acid encodes a protein of SEQ ID NO:357. In one embodiment, donor template nucleic acid comprises a sequence having at least 70%, at least 71%, at least 72%, at least 73%, at least 74%, at least 75%, at least 76%, at least 77%, at least 78%, at least 79%, 80%, at least 81%, at least 82%, at least 83%, at least 84%, at least 85%, at least 86%, at least 87%, at least 88%, at least 89%, 90%, at least 91%, at least 92%, at least 93%, at least 94%, at least 95%, at least 96%, at least 97%, at least 98%, or at least 99% homology to SEQ ID NO:358 In one embodiment, donor template nucleic acid comprises a sequence of SEQ ID NO:358.

[0328] The present disclosure provides methods of treating, reducing the symptoms of, and/or reducing the risk of developing a disease or disorder and/or genetic modification to produce a desired phenotypic outcome. For example, in one embodiment, methods of the disclosure of treat, reduce the symptoms of, and/or reduce the risk of developing a disease or disorder in a mammal. In one embodiment, the methods of the disclosure of treat, reduce the symptoms of, and/or reduce the risk of developing a disease or disorder in a plant. In one embodiment, the methods of the disclosure of treat, reduce the symptoms of, and/or reduce the risk of developing a disease or disorder in a yeast organism.

[0329] In one embodiment, the disease or disorder is caused by one or more mutations in a genomic locus. Thus, in one embodiment, the disease or disorder is may be treated, reduced, or the risk can be reduced via introducing a nucleic acid sequence that corresponds to the wild type sequence of the region having the one or more mutations and/or introducing an element that prevents or reduces the expression of the genomic sequence having the one or more mutations. Thus, in one embodiment, the method comprises manipulation of a target sequence within a coding, non-coding or regulatory element of the genomic locus in a target sequence.

[0330] For example, in one embodiment, the disease is a monogenic disease. In one embodiment, the disease includes, but is not limited to, Duchenne muscular dystrophy (mutations occurring in Dystrophin), Limb-Girdle Muscular Dystrophy type 2B (LGMD2B) and Miyoshi myopathy (mutations occurring in Dysferlin), Cystic Fibrosis (mutations occurring in CFTR), Wilson's disease (mutations occurring in ATP7B) and Stargardt Macular Degeneration (mutations occurring in ABCA4).

[0331] The present disclosure also provides methods of modulating the expression of a gene or genetic material. For example, in one embodiment, the methods of the disclosure provide deliver a genetic material to confer a phenotype in a cell or organism. For example, in one embodiment, the method provides resistance to pathogens. In one embodiment, the method provides for modulation of metabolic pathways. In one embodiment, the method provides for the production and use of a material in an organism. For example, in one embodiment, the method generates a material, such as a biologic, a pharmaceutical, and a biofuel, in an organism such as a eukaryote, yeast, bacteria, or plant.

[0332] In one embodiment, the method comprises administering a fusion protein or a nucleic acid molecule encoding a fusion protein; a guide nucleic acid comprising a targeting nucleotide sequence complimentary to a target region in the gene; and a donor template nucleic acid comprising a U3 sequence, a U5 sequence. In one embodiment, the method further comprises administering a donor template sequence.

[0333] In one embodiment, the target sequence is located within a gene. In one embodiment, the donor template sequence disrupts the sequence of a gene thereby inhibiting or reducing the expression of the gene. In one embodiment, target sequence has a mutation and the donor template sequence inserts a corrected sequence into the target sequence, thereby correcting the gene mutation. In one embodiment, the donor template sequence is a gene sequence and inserting the donor template sequence into a target sequence in a cell allows for expression of the gene.

[0334] In some embodiments, the gene is any target gene of interest. For example, in one embodiment, the gene is any gene associated an increase in the risk of having or developing a disease. In some embodiments, the method comprises introducing the nucleic acid molecule encoding a fusion protein; the guide nucleic acid comprising a targeting nucleotide sequence complimentary to a target region in the gene; and the donor template nucleic acid comprising a U3 sequence, a U5 sequence and a donor template sequence. In one embodiment, the IN-Cas9 fusion protein binds to a target polynucleotide to effect cleavage of the target polynucleotide within the gene. In one embodiment, the IN-Cas9 fusion protein is complexed with the guide nucleic acid that is hybridized to the target sequence within the target polynucleotide. In one embodiment, the IN-Cas9 fusion protein is complexed with the nucleic acid sequence coding a donor template nucleic acid. In one embodiment, the IN-Cas9 fusion protein is complexed with the nucleic acid sequence coding a guide nucleic acid. In one embodiment, the IN-Cas9 fusion protein is complexed with the nucleic acid sequence coding a guide nucleic acid and the nucleic acid sequence coding a donor template nucleic acid. In one embodiment, the IN-Cas9 fusion protein is complexed with the guide nucleic acid that is hybridized to the target sequence within the target polynucleotide and the donor template nucleic acid. In one embodiment, the IN-Cas9 fusion protein is complexed with the donor template nucleic acid. In one embodiment, the IN-Cas9 fusion protein is complexed with the guide nucleic acid. In one embodiment, the IN-Cas9 fusion protein is complexed with the guide nucleic acid and the donor template nucleic acid.

[0335] In some embodiments, the IN-Cas9 catalyzes the integration of the donor template into to the gene. In one embodiment, the integration introduces one or more mutations into the gene. In some embodiments, said mutation results in one or more amino acid changes in a protein expression from a gene comprising the target sequence.

### Sequences

[0336] Table 1 provides a summary of sequences.

| SEQ ID | Type | Description |
|---|---|---|
| 1 | Protein | Cas9 |
| 2 | Protein | dCas9 |
| 3 | Protein | SaCas9 |
| 4 | Protein | dSaCas9 |
| 5 | Protein | Cpf1 |
| 6 | Protein | dCpf1 |
| 7 | Protein | Cas14 |
| 8 | Protein | dCas14 |
| 9 | Protein | HIV IN |
| 10 | Protein | HIV INΔC |
| 11 | Protein | HIV tdINΔC |
| 12 | Protein | HIV E85G IN |
| 13 | Protein | HIV E85G INΔC |
| 14 | Protein | HIV E85F IN |
| 15 | Protein | HIV E85F INΔC |
| 16 | Protein | HIV D116N IN |
| 17 | Protein | HIV D116N INΔC |
| 18 | Protein | HIV F185K:C280S IN |
| 19 | Protein | HIV C280S IN |
| 20 | Protein | HIV F185K IN |
| 21 | Protein | HIV F185K INΔC |
| 22 | Protein | HIV T97A:Y143R IN |
| 23 | Protein | HIV T97A:Y143R INΔC |
| 24 | Protein | HIV G140S:Q148H IN |
| 25 | Protein | HIV G140S:Q148H INΔC |
| 26 | Protein | RSV IN |
| 27 | Protein | RSV INΔC |
| 28 | Protein | HFV IN |
| 29 | Protein | HFV INΔC |
| 30 | Protein | EIAV IN |
| 31 | Protein | EIAV INΔC |
| 32 | Protein | MoLV IN |
| 33 | Protein | MoLV INΔC |
| 34 | Protein | MMTV IN |
| 35 | Protein | MMTV INΔC |
| 36 | Protein | WDSV IN |
| 37 | Protein | WDSV INΔC |
| 38 | Protein | BLV IN |
| 39 | Protein | BLV INΔC |
| 40 | Protein | SIV IN |
| 41 | Protein | SIV INΔC |
| 42 | Protein | FIV IN |
| 43 | Protein | FIV INΔC |
| 44 | Protein | BIV IN |
| 45 | Protein | BIV INΔC |
| 46 | Protein | Ty1 INΔC |
| 47 | Protein | InsF IN |
| 48 | Protein | InsF INΔN |
| 49 | Protein | 1xSV40 |
| 50 | Protein | 3xSV40 |
| 51 | Protein | 3xFLAG |
| 52 | Protein | NPM |
| 53 | Protein | Ty1 |
| 54 | Protein | TY2 |
| 55 | Protein | INO4 |
| 56 | Protein | MAK11 |
| 57 | Protein | STH1 |
| 58 | Protein | 1xSV40 + 3xFLAG |
| 59 | Protein | 3xSV40 + 3xFLAG |
| 60 | Protein | NPM + 3xFLAG |
| 61 | Protein | Ty1 + 3xFLAG |
| 62 | Protein | NPM + 3xSV40 + 3xFLAG |
| 63 | Protein | HIV IN-dCas14-Ty1 |
| 64 | Protein | HIV INΔC-dCas14-Ty1 |
| 65 | Protein | HIV tdINΔC-dCas14-Ty1 |
| 66 | Protein | HIV E85G IN-dCas14-Ty1 |
| 67 | Protein | HIV E85G INΔC-dCas14-Ty1 |
| 68 | Protein | HIV E85F IN-dCas14-Ty1 |
| 69 | Protein | HIV E85F INΔC-dCas14-Ty1 |
| 70 | Protein | HIV D116N IN-dCas14-Ty1 |
| 71 | Protein | HIV D116N INΔC-dCas14-Ty1 |
| 72 | Protein | HIV F185K:C280S IN-dCas14-Ty1 |
| 73 | Protein | HIV C280S IN-dCas14-Ty1 |
| 74 | Protein | HIV F185K IN-dCas14-Ty1 |
| 75 | Protein | HIV F185K INΔC-dCas14-Ty1 |
| 76 | Protein | HIV T97A:Y143R IN-dCas14-Ty1 |
| 77 | Protein | HIV T97A:Y143R INΔC-dCas14-Ty1 |
| 78 | Protein | HIV G140S:Q148H IN-dCas14-Ty1 |
| 79 | Protein | HIV G140S:Q148H INΔC-dCas14-Ty1 |
| 80 | Protein | RSV IN-dCas14-Ty1 |
| 81 | Protein | RSV INΔC-dCas14-Ty1 |
| 82 | Protein | HFV IN-dCas14-Ty1 |
| 83 | Protein | HFV INΔC-dCas14-Ty1 |
| 84 | Protein | EIAV IN-dCas14-Ty1 |
| 85 | Protein | EIAV INΔC-dCas14-Ty1 |
| 86 | Protein | MoLV IN-dCas14-Ty1 |
| 87 | Protein | MoLV INΔC-dCas14-Ty1 |
| 88 | Protein | MMTV IN-dCas14-Ty1 |
| 89 | Protein | MMTV INΔC-dCas14-Ty 1 |
| 90 | Protein | WDSV IN-dCas14-Ty1 |
| 91 | Protein | WDSV INΔC-dCas14-Ty1 |
| 92 | Protein | BLV IN-dCas14-Ty1 |
| 93 | Protein | BLV INΔC-dCas14-Ty1 |
| 94 | Protein | SIV IN-dCas14-Ty1 |
| 95 | Protein | SIV INΔC-dCas14-Ty1 |
| 96 | Protein | FIV IN-dCas14-Ty1 |
| 97 | Protein | FIV INΔC-dCas14-Ty1 |
| 98 | Protein | BIV IN-dCas14-Ty1 |
| 99 | Protein | BV INΔC-dCas14-Ty1 |
| 100 | Protein | Ty1 INΔC-dCas14-Ty1 |
| 101 | Protein | InsF IN-dCas14-Ty1 |
| 102 | Protein | InsF INΔN-dCas14-Ty1 |
| 103 | Protein | HIV IN-dCas9-Ty1 |
| 104 | Protein | HIV INΔC-dCas9-Ty1 |
| 105 | Protein | HIV tdINΔC-dCas9-Ty1 |
| 106 | Protein | HIV E85G IN-dCas9-Ty1 |
| 107 | Protein | HIV E85G INΔC-dCas9-Ty1 |
| 108 | Protein | HIV E85F IN-dCas9-Ty1 |
| 109 | Protein | HIV E85F INΔC-dCas9-Ty1 |
| 110 | Protein | HIV D116N IN-dCas9-Ty1 |
| 111 | Protein | HIV D116N INΔC-dCas9-Ty1 |
| 112 | Protein | HIV F185K:C280S IN-dCas9-Ty1 |
| 113 | Protein | HIV C280S IN-dCas9-Ty1 |
| 114 | Protein | HIV F185K IN-dCas9-Ty1 |
| 115 | Protein | HIV F185K INΔC-dCas9-Ty1 |
| 116 | Protein | HIV T97A:Y143R IN-dCas9-Ty1 |
| 117 | Protein | HIV T97A:Y143R INΔC-dCas9-Ty1 |
| 118 | Protein | HIV G140S:Q148H IN-dCas9-Ty1 |
| 119 | Protein | HIV G140S:Q148H INΔC-dCas9-Ty1 |
| 120 | Protein | RSV IN-dCas9-Ty1 |
| 121 | Protein | RSV INΔC-dCas9-Ty1 |
| 122 | Protein | HFV IN-dCas9-Ty1 |
| 123 | Protein | HFV INΔC-dCas9-Ty1 |
| 124 | Protein | EIAV IN-dCas9-Ty1 |
| 125 | Protein | EIAV INΔC-dCas9-Ty1 |
| 126 | Protein | MoLV IN-dCas9-Ty1 |
| 127 | Protein | MoLV INΔC-dCas9-Ty1 |
| 128 | Protein | MMTV IN-dCas9-Ty1 |
| 129 | Protein | MMTV INΔC-dCas9-Ty1 |
| 130 | Protein | WDSV IN-dCas9-Ty1 |
| 131 | Protein | WDSV INΔC-dCas9-Ty1 |
| 132 | Protein | BLV IN-dCas9-Ty1 |
| 133 | Protein | BLV INΔC-dCas9-Ty1 |
| 134 | Protein | SIV IN-dCas9-Ty1 |
| 135 | Protein | SIV INΔC-dCas9-Ty1 |
| 136 | Protein | FIV IN-dCas9-Ty1 |
| 137 | Protein | FIV INΔC-dCas9-Ty1 |
| 138 | Protein | BIV IN-dCas9-Ty1 |
| 139 | Protein | BV INΔC-dCas9-Ty1 |
| 140 | Protein | Ty1 INΔC-dCas9-Ty1 |
| 141 | Protein | InsF IN-dCas9-Ty1 |
| 142 | Protein | InsF INΔN-dCas9-Ty1 |
| 143 | Protein | 3xFLAG-Ty1NLS-dCas9-linker-INdC |
| 144 | Protein | NLS-INdC(HIV)-linker-dSaCas9- |
| | | Ty1n1s-3xFlag |
| 145 | Protein | 3xFLAG-Ty1 NLS-dCas14-linker-INdC |
| 146 | Protein | INdC-linker-dCas14-Ty1 NLS-3xFLAG |
| 147 | Protein | Cas9-NPM Fusion: 3XFLAG-SV40 |
| | | NLS-Cas9-NPM NLS |
| 148 | Protein | Cas9-Ty1 Fusion: 3XFLAG-SV40 |
| | | NLS-Cas9-Ty1 NLS |
| 149 | Protein | Cas14-Ty1 Fusion3xFLAG-Ty1 |
| | | NLS-Cas14 |
| 150 | Protein | VPR-INDC-dCas9 |
| 151 | Protein | INDC-dCas9-VPR |
| 152 | Protein | VPR |
| 153 | Nucleic Acid | Cas9 |
| 154 | Nucleic Acid | dCas9 |
| 155 | Nucleic Acid | SaCas9 |
| 156 | Nucleic Acid | dSaCas9 |
| 157 | Nucleic Acid | Cpf1 |
| 158 | Nucleic Acid | dCpf1 |
| 159 | Nucleic Acid | Cas14 |
| 160 | Nucleic Acid | dCas14 |
| 161 | Nucleic Acid | HIV IN |
| 162 | Nucleic Acid | HIV INΔC |
| 163 | Nucleic Acid | HIV tdINΔC |
| 164 | Nucleic Acid | HIV E85G IN |
| 165 | Nucleic Acid | HIV E85G INΔC |
| 166 | Nucleic Acid | HIV E85F IN |
| 167 | Nucleic Acid | HIV E85F INΔC |
| 168 | Nucleic Acid | HIV D116N IN |
| 169 | Nucleic Acid | HIV D116N INΔC |
| 170 | Nucleic Acid | HIV F185K:C280S IN |
| 171 | Nucleic Acid | HIV C280S IN |
| 172 | Nucleic Acid | HIV F185K IN |
| 173 | Nucleic Acid | HIV F185K INΔC |
| 174 | Nucleic Acid | HIV T97A:Y143R IN |
| 175 | Nucleic Acid | HIV T97A:Y143R INΔC |
| 176 | Nucleic Acid | HIV G140S:Q148H IN |
| 177 | Nucleic Acid | HIV G140S:Q148H INΔC |
| 178 | Nucleic Acid | RSV IN |
| 179 | Nucleic Acid | RSV INΔC |
| 180 | Nucleic Acid | HFV IN |
| 181 | Nucleic Acid | HFV INΔC |
| 182 | Nucleic Acid | EIAV IN |
| 183 | Nucleic Acid | EIAV INΔC |
| 184 | Nucleic Acid | MoLV IN |
| 185 | Nucleic Acid | MoLV INΔC |
| 186 | Nucleic Acid | MMTV IN |
| 187 | Nucleic Acid | MMTV INΔC |
| 188 | Nucleic Acid | WDSV IN |
| 189 | Nucleic Acid | WDSV INΔC |
| 190 | Nucleic Acid | BLV IN |
| 191 | Nucleic Acid | BLV INΔC |
| 192 | Nucleic Acid | SIV IN |
| 193 | Nucleic Acid | SIV INΔC |
| 194 | Nucleic Acid | FIV IN |
| 195 | Nucleic Acid | FIV INΔC |
| 196 | Nucleic Acid | BIV IN |
| 197 | Nucleic Acid | BV INΔC |
| 198 | Nucleic Acid | Ty1 INΔC |
| 199 | Nucleic Acid | InsF IN |
| 200 | Nucleic Acid | InsF INΔN |
| 201 | Nucleic Acid | 1xSV40 |
| 202 | Nucleic Acid | 3xSV40 |
| 203 | Nucleic Acid | 3xFLAG |
| 204 | Nucleic Acid | NPM |
| 205 | Nucleic Acid | Ty1 |
| 206 | Nucleic Acid | 1xSV40 + 3xFLAG |
| 207 | Nucleic Acid | 3xSV40 + 3xFLAG |
| 208 | Nucleic Acid | NPM + 3xFLAG |
| 209 | Nucleic Acid | Ty1 + 3xFLAG |
| 210 | Nucleic Acid | NPM + 3xSV40 + 3xFLAG |
| 211 | Nucleic Acid | HIV IN-dCas9-Ty1 |
| 212 | Nucleic Acid | HIV INΔC-dCas9-Ty1 |
| 213 | Nucleic Acid | HIV tdINΔC-dCas9-Ty1 |
| 214 | Nucleic Acid | HIV E85G IN-dCas9-Ty1 |
| 215 | Nucleic Acid | HIV E85G INΔC-dCas9-Ty1 |
| 216 | Nucleic Acid | HIV E85F IN-dCas9-Ty1 |
| 217 | Nucleic Acid | HIV E85F INΔC-dCas9-Ty1 |
| 218 | Nucleic Acid | HIV D116N IN-dCas9-Ty1 |
| 219 | Nucleic Acid | HIV D116N INΔC-dCas9-Ty1 |
| 220 | Nucleic Acid | HIV F185K:C280S IN-dCas9-Ty1 |
| 221 | Nucleic Acid | HIV C280S IN-dCas9-Ty1 |
| 222 | Nucleic Acid | HIV F185K IN-dCas9-Ty1 |
| 223 | Nucleic Acid | HIV F185K INΔC-dCas9-Ty1 |
| 224 | Nucleic Acid | HIV T97A:Y143R IN-dCas9-Ty1 |
| 225 | Nucleic Acid | HIV T97A:Y143R INΔC-dCas9-Ty1 |
| 226 | Nucleic Acid | HIV G140S:Q148H IN-dCas9-Ty1 |
| 227 | Nucleic Acid | HIV G140S:Q148H INΔC-dCas9-Ty1 |
| 228 | Nucleic Acid | RSV IN-dCas9-Ty1 |
| 229 | Nucleic Acid | RSV INΔC-dCas9-Ty1 |
| 230 | Nucleic Acid | HFV IN-dCas9-Ty1 |
| 231 | Nucleic Acid | HFV INΔC-dCas9-Ty1 |
| 232 | Nucleic Acid | EIAV IN-dCas9-Ty1 |
| 233 | Nucleic Acid | EIAV INΔC-dCas9-Ty 1 |
| 234 | Nucleic Acid | MoLV IN-dCas9-Ty1 |
| 235 | Nucleic Acid | MoLV INΔC-dCas9-Ty1 |
| 236 | Nucleic Acid | MMTV IN-dCas9-Ty1 |
| 237 | Nucleic Acid | MMTV INΔC-dCas9-Ty1 |
| 238 | Nucleic Acid | WDSV IN-dCas9-Ty1 |
| 239 | Nucleic Acid | WDSV INΔC-dCas9-Ty1 |
| 240 | Nucleic Acid | BLV IN-dCas9-Ty1 |
| 241 | Nucleic Acid | BLV INΔC-dCas9-Ty1 |
| 242 | Nucleic Acid | SIV IN-dCas9-Ty1 |
| 243 | Nucleic Acid | SIV INΔC-dCas9-Ty1 |
| 244 | Nucleic Acid | FIV IN-dCas9-Ty1 |
| 245 | Nucleic Acid | FIV INΔC-dCas9-Ty1 |
| 246 | Nucleic Acid | BIV IN-dCas9-Ty1 |
| 247 | Nucleic Acid | BV INΔC-dCas9-Ty1 |
| 248 | Nucleic Acid | Ty1 INΔC-dCas9-Ty1 |
| 249 | Nucleic Acid | InsF IN-dCas9-Ty1 |
| 250 | Nucleic Acid | InsF INΔN-dCas9-Ty1 |
| 251 | Nucleic Acid | 3xFLAG-Ty1NLS-dCas9-linker-INdC |
| 252 | Nucleic Acid | NLS-INdC(HIV)-linker-dSaCas9-Ty1n1s- |
| | | 3xFlag |
| 253 | Nucleic Acid | 3xFLAG-Ty1 NLS-dCas14-linker-INdC |
| 254 | Nucleic Acid | INdC-linker-dCas14-Ty1 NLS-3xFLAG |
| 255 | Nucleic Acid | Cas9-NPM Fusion: 3XFLAG-SV40 |
| | | NLS-Cas9-NPM NLS |
| 256 | Nucleic Acid | Cas9-Ty1 Fusion: 3XFLAG-SV40 |
| | | NLS-Cas9-Ty1 NLS |
| 257 | Nucleic Acid | Cas14-Ty1 Fusion: 3xFLAG-Ty1 |
| | | NLS-Cas14 |
| 258 | Nucleic Acid | HIV U3 |
| 259 | Nucleic Acid | HIV U5 |
| 260 | Nucleic Acid | RSV U3 |
| 261 | Nucleic Acid | RSV U5 |
| 262 | Nucleic Acid | HFV U3 |
| 263 | Nucleic Acid | HFV U5 |
| 264 | Nucleic Acid | EIAV U3 |
| 265 | Nucleic Acid | EIAV U5 |
| 266 | Nucleic Acid | MoLV U3 |
| 267 | Nucleic Acid | MoLV U5 |
| 268 | Nucleic Acid | MMTV U3 |
| 269 | Nucleic Acid | MMTV U5 |
| 270 | Nucleic Acid | WDSV U3 |
| 271 | Nucleic Acid | WDSV U5 |
| 272 | Nucleic Acid | BLV U3 |
| 273 | Nucleic Acid | BLV U5 |
| 274 | Nucleic Acid | SIV U3 |
| 275 | Nucleic Acid | SIV U5 |
| 276 | Nucleic Acid | FIV U3 |
| 277 | Nucleic Acid | FIV U5 |
| 278 | Nucleic Acid | BIV U3 |
| 279 | Nucleic Acid | BIV U5 |
| 280 | Nucleic Acid | TY1 U3 |
| 281 | Nucleic Acid | TY1 U5 |
| 282 | Nucleic Acid | InsF IS3 IRL |
| 283 | Nucleic Acid | InsF IS3 IRR |
| 284 | Nucleic Acid | INsrt HIV empty vector |
| 285 | Nucleic Acid | INsrt RSV empty vector |
| 286 | Nucleic Acid | INsrt MoLV empty vector: |
| 287 | Nucleic Acid | INsrt MMTV empty vector |
| 288 | Nucleic Acid | INsrt BLV empty vector |
| 289 | Nucleic Acid | INsrt WDSV empty vector |
| 290 | Nucleic Acid | INsrt EIAV empty vector |
| 291 | Nucleic Acid | INsrt SIV empty vector |
| 292 | Nucleic Acid | INsrt FIV empty vector |
| 293 | Nucleic Acid | INsrt BIV empty vector |
| 294 | Nucleic Acid | INsrt HFV empty vector |
| 295 | Nucleic Acid | INsrt Ty1 empty vector |
| 296 | Nucleic Acid | INsrt IS3 empty vector (for InsF) |
| 297 | Nucleic Acid | INsrt(HIV)-IG3-CmR |
| 298 | Nucleic Acid | INsrt(HIV)-IG3-mCherry-2a-Puro-pA |
| 299 | Nucleic Acid | amilCP ORF target sequence |
| 300 | Nucleic Acid | amilCP open reading frame in pCRII |
| | | backbone |
| 301 | Nucleic Acid | eGFP ORF target sequence |
| 302 | Nucleic Acid | eGFP ORF target sequence |
| 303 | Nucleic Acid | eEF1a1 3'UTR target sequence |
| 304 | Nucleic Acid | amilCP target A |
| 305 | Nucleic Acid | amilCP target B |
| 306 | Nucleic Acid | GFP target A |
| 307 | Nucleic Acid | GFP target B |
| 308 | Nucleic Acid | eEF1A1 3'UTR target A |
| 309 | Nucleic Acid | eEF1A1 3'UTR target B |
| 310 | Nucleic Acid | VPR-INdC-dCas9 |
| 311 | Nucleic Acid | INdC-dCas9-VPR |
| 312 | Nucleic Acid | VPR |
| 313 | Nucleic Acid | ts-2a-Lucifease |
| 314 | Nucleic Acid | Lenti-IRES-tdTO |
| 315 | Nucleic Acid | INdC-dCas9-psPax2 |
| 316 | Nucleic Acid | dCas9-INdC-psPax2 |
| 317 | Nucleic Acid | INdC-TALEN(GFP-L)-psPax2 |
| 318 | Nucleic Acid | INdC-TALEN(GFP-R)-psPax2 |
| 319 | Nucleic Acid | TALEN(GFP-R)-INDC-psPax2 |
| 320 | Nucleic Acid | TALEN(GFP-L)-INDC-psPax2 |
| 321 | Nucleic Acid | Guide-RNA target sequence IN-TALEN |
| | | GFP-L |
| 322 | Nucleic Acid | Guide-RNA target sequenc IN-TALEN |
| | | GFP-R |
| 323 | Nucleic Acid | Guide-RNA target sequence INdC-TALEN |
| | | GFP-L |
| 324 | Nucleic Acid | Guide-RNA target sequenc INdC-TALEN |
| | | GFP-R |
| 325 | Nucleic Acid | 3xFLAG-Ty1 NLS-TALEN-INDC-40L |
| 326 | Nucleic Acid | 3xFLAG-Ty1 NLS-TALEN-INDC-40R |
| 327 | Nucleic Acid | 3xFLAG-Ty1 NLS-TALEN-INDC-44R |
| 328 | Nucleic Acid | INDC-TALEN-Ty1 NLS-3xFLAG-41R |
| 329 | Nucleic Acid | INDC-TALEN-Ty1 NLS-3xFLAG-45L |
| 330 | Nucleic Acid | INDC-TALEN-Ty1 NLS-3xFLAG-45R |
| 331 | Nucleic Acid | INDC-TALEN-Ty1 NLS-3xFLAG-48L |
| 332 | Nucleic Acid | pCRII-amilCP |
| 333 | Nucleic Acid | EEF1A2 (EF1A2) promoter −493 to +1261 |
| 334 | Nucleic Acid | EEF1A2 (EF1A2) promoter −493 to +23 |
| 335 | Nucleic Acid | minimal EEF1A2 ((EF1A2) core |
| | | promoter −221 to +23 |
| 336 | Nucleic Acid | Cas14 wt tracrRNA |
| 337 | Nucleic Acid | Cas14 T2A tracrRNA |
| 338 | Nucleic Acid | Cas 14 T3C tracrRNA |
| 339 | Nucleic Acid | Cas 14 T4C tracrRNA |
| 340 | Nucleic Acid | WT tracr mate |
| 341 | Nucleic Acid | T2A tracr mate |
| 342 | Nucleic Acid | Cas14 Mini tracr mate |
| 343 | Nucleic Acid | Cas 14 Micro tracr mate |
| 344 | Nucleic Acid | WT sgRNA without Spacer |
| 345 | Nucleic Acid | Cas14 T2A sgRNA without Spacer |
| 346 | Nucleic Acid | Cas14 T3C sgRNA without Spacer |
| 347 | Nucleic Acid | Cas 14 T4G sgRNA without Spacer |
| 348 | Nucleic Acid | Cas14 Mini sgRNA without Spacer |
| 349 | Nucleic Acid | Cas14 Micro sgRNA without Spacer |
| 350 | Nucleic Acid | wt Cas14 sgRNA |
| 351 | Nucleic Acid | Cas14 T2A sgRNA |
| 352 | Nucleic Acid | Cas14 T3C sgRNA |
| 353 | Nucleic Acid | Cas14 T4C sgRNA |
| 354 | Nucleic Acid | Cas14 mini sgRNA |
| 355 | Nucleic Acid | Cas 14 micro sgRNA |
| 356 | Nucleic Acid | Frame-shift activated Luciferase reporter |
| | | containing CRISPR-Cas14 target sequence |
| 357 | Protein | hFXN |
| 358 | Nucleic Acid | hFXN |
| 359 | Nucleic Acid | Lentiviral EF1A2-hFXN (LTR-psi-RRE- |
| | | cPPT-EF1A2-hFXN-WPRE-sinLTR) |
| 360 | Nucleic Acid | scAAV EF1A2-hFXN (ITR-EF1A2- |
| | | hFXN-WPRE-BGHpA-(dD)ITR) |
| 361 | Protein | Ty1-like NLS O28090-0 |
| 362 | Protein | Ty1-like NLS O50087-0 |
| 363 | Protein | Ty1-like NLS O58353-0 |
| 364 | Protein | Ty1-like NLS Q57602-0 |
| 365 | Protein | Ty1-like NLS Q6L1X9-0 |
| 366 | Protein | Ty1-like NLS A0K3M1-0 |
| 367 | Protein | Ty1-like NLS A0LYZ1-0 |
| 368 | Protein | Ty1-like NLS A1B022-0 |
| 369 | Protein | Ty1-like NLS A1V8A7-0 |
| 370 | Protein | Ty1-like NLS A1VIP6-0 |
| 371 | Protein | Ty1-like NLS A2RDW6-0 |
| 372 | Protein | Ty1-like NLS A2S7H2-0 |
| 373 | Protein | Ty1-like NLS A3MRV0-0 |
| 374 | Protein | Ty1-like NLS A3NEI3-0 |
| 375 | Protein | Ty1-like NLS A3P0B7-0 |
| 376 | Protein | Ty1-like NLS A4JAN6-0 |
| 377 | Protein | Ty1-like NLS A4SUV7-0 |
| 378 | Protein | Ty1-like NLS A5FP03-0 |
| 379 | Protein | Ty1-like NLS A5ILZ2-0 |
| 380 | Protein | Ty1-like NLS A6GY20-0 |
| 381 | Protein | Ty1-like NLS A6LLI5-0 |
| 382 | Protein | Ty1-like NLS A6LQX4-0 |
| 383 | Protein | Ty1-like NLS A8F6X2-0 |
| 384 | Protein | Ty1-like NLS A8G6B7-0 |
| 385 | Protein | Ty1-like NLS A9ADI9-0 |
| 386 | Protein | Ty1-like NLS A9IJ08-0 |
| 387 | Protein | Ty1-like NLS A9IXA1-0 |
| 388 | Protein | Ty1-like NLS A9NEN2-0 |
| 389 | Protein | Ty1-like NLS B0S140-0 |
| 390 | Protein | Ty1-like NLS B1JU18-0 |
| 391 | Protein | Ty1-like NLS B1LBA1-0 |
| 392 | Protein | Ty1-like NLS B1W354-0 |
| 393 | Protein | Ty1-like NLS B1XSP7-0 |
| 394 | Protein | Ty1-like NLS B1YRC6-0 |
| 395 | Protein | Ty1-like NLS B2JIH0-0 |
| 396 | Protein | Ty1-like NLS B2T755-0 |
| 397 | Protein | Ty1-like NLS B2UEM3-0 |
| 398 | Protein | Ty1-like NLS B3PLU0-0 |
| 399 | Protein | Ty1-like NLS B3R7T2-0 |
| 400 | Protein | Ty1-like NLS B4E5B6-0 |
| 401 | Protein | Ty1-like NLS B4S3C9-0 |
| 402 | Protein | Ty1-like NLS B7IHT4-0 |
| 403 | Protein | Ty1-like NLS B8E0X6-0 |
| 404 | Protein | Ty1-like NLS B9K7W0-0 |
| 405 | Protein | Ty1-like NLS C1A494-0 |
| 406 | Protein | Ty1-like NLS C5CE41-0 |
| 407 | Protein | Ty1-like NLS O88058-0 |
| 408 | Protein | Ty1-like NLS P0DG92-0 |
| 409 | Protein | Ty1-like NLS P0DG93-0 |
| 410 | Protein | Ty1-like NLS P60554-0 |
| 411 | Protein | Ty1-like NLS P67354-0 |
| 412 | Protein | Ty1-like NLS P75311-0 |
| 413 | Protein | Ty1-like NLS P75471-0 |
| 414 | Protein | Ty1-like NLS P94372-0 |
| 415 | Protein | Ty1-like NLS Q056Y0-0 |
| 416 | Protein | Ty1-like NLS Q057D7-0 |
| 417 | Protein | Ty1-like NLS Q0AYB7-0 |
| 418 | Protein | Ty1-like NLS Q0BJ50-0 |
| 419 | Protein | Ty1-like NLS Q0K610-0 |
| 420 | Protein | Ty1-like NLS Q0STA4-0 |
| 421 | Protein | Ty1-like NLS Q0STL9-0 |
| 422 | Protein | Ty1-like NLS Q0TQV7-0 |
| 423 | Protein | Ty1-like NLS Q0TR88-0 |
| 424 | Protein | Ty1-like NLS Q12GX5-0 |
| 425 | Protein | Ty1-like NLS Q13TG6-0 |
| 426 | Protein | Ty1-like NLS Q1AWG1-0 |
| 427 | Protein | Ty1-like NLS Q1BRU4-0 |
| 428 | Protein | Ty1-like NLS Q1J5X5-0 |
| 429 | Protein | Ty1-like NLS Q1JAY8-0 |
| 430 | Protein | Ty1-like NLS Q1JG57-0 |
| 431 | Protein | Ty1-like NLS Q1JL34-0 |
| 432 | Protein | Ty1-like NLS Q1LI28-0 |
| 433 | Protein | Ty1-like NLS Q2L2H3-0 |
| 434 | Protein | Ty1-like NLS Q2NIH1-0 |
| 435 | Protein | Ty1-like NLS Q2SU23-0 |
| 436 | Protein | Ty1-like NLS Q39KH1-0 |
| 437 | Protein | Ty1-like NLS Q3JMQ8-0 |
| 438 | Protein | Ty1-like NLS Q3YRL8-0 |
| 439 | Protein | Ty1-like NLS Q46WD9-0 |
| 440 | Protein | Ty1-like NLS Q48SQ4-0 |
| 441 | Protein | Ty1-like NLS Q49418-0 |
| 442 | Protein | Ty1-like NLS Q56307-0 |
| 443 | Protein | Ty1-like NLS Q5LEQ4-0 |
| 444 | Protein | Ty1-like NLS Q5WEJ7-0 |
| 445 | Protein | Ty1-like NLS Q5XBA0-0 |
| 446 | Protein | Ty1-like NLS Q62GK1-0 |
| 447 | Protein | Ty1-like NLS Q63Q07-0 |
| 448 | Protein | Ty1-like NLS Q64VP0-0 |
| 449 | Protein | Ty1-like NLS Q6G3V1-0 |
| 450 | Protein | Ty1-like NLS Q6G5M0-0 |
| 451 | Protein | Ty1-like NLS Q6LLQ8-0 |
| 452 | Protein | Ty1-like NLS Q6MDC1-0 |
| 453 | Protein | Ty1-like NLS Q6MDH4-0 |
| 454 | Protein | Ty1-like NLS Q6ME08-0 |
| 455 | Protein | Ty1-like NLS Q73PH4-0 |
| 456 | Protein | Ty1-like NLS Q7MAD1-0 |
| 457 | Protein | Ty1-like NLS Q7UP72-0 |
| 458 | Protein | Ty1-like NLS Q7VTD6-0 |
| 459 | Protein | Ty1-like NLS Q7W2F9-0 |
| 460 | Protein | Ty1-like NLS Q7WRC8-0 |
| 461 | Protein | Ty1-like NLS Q828D0-0 |
| 462 | Protein | Ty1-like NLS Q895M9-0 |
| 463 | Protein | Ty1-like NLS Q8AAP0-0 |
| 464 | Protein | Ty1-like NLS Q8D1X2-0 |
| 465 | Protein | Ty1-like NLS Q8K908-0 |
| 466 | Protein | Ty1-like NLS Q8P0C9-0 |
| 467 | Protein | Ty1-like NLS Q8XKR1-0 |
| 468 | Protein | Ty1-like NLS Q8XL46-0 |
| 469 | Protein | Ty1-like NLS Q8XV09-0 |
| 470 | Protein | Ty1-like NLS Q93Q47-0 |
| 471 | Protein | Ty1-like NLS Q9L0Q6-0 |
| 472 | Protein | Ty1-like NLS Q9L0Q6-1 |
| 473 | Protein | Ty1-like NLS Q9L0Q6-2 |
| 474 | Protein | Ty1-like NLS Q9L0Q6-3 |
| 475 | Protein | Ty1-like NLS Q9L0Q6-4 |
| 476 | Protein | Ty1-like NLS Q9L0Q6-5 |
| 477 | Protein | Ty1-like NLS Q9L0Q6-6 |
| 478 | Protein | Ty1-like NLS Q9X1S8-0 |
| 479 | Protein | Ty1-like NLS A1CNV8-0 |
| 480 | Protein | Ty1-like NLS A1D1R8-0 |
| 481 | Protein | Ty1-like NLS A1D731-0 |
| 482 | Protein | Ty1-like NLS A2QAX7-0 |
| 483 | Protein | Ty1-like NLS A3LQ55-0 |
| 484 | Protein | Ty1-like NLS A5DGY0-0 |
| 485 | Protein | Ty1-like NLS A5DKW3-0 |
| 486 | Protein | Ty1-like NLS A5DLG8-0 |
| 487 | Protein | Ty1-like NLS A5DY34-0 |
| 488 | Protein | Ty1-like NLS A6RBB0-0 |
| 489 | Protein | Ty1-like NLS A6RMZ2-0 |
| 490 | Protein | Ty1-like NLS A6ZL85-0 |
| 491 | Protein | Ty1-like NLS A6ZZJ1-0 |
| 492 | Protein | Ty1-like NLS A7E4K0-0 |
| 493 | Protein | Ty1-like NLS G0S8I1-0 |
| 494 | Protein | Ty1-like NLS O13527-0 |
| 495 | Protein | Ty1-like NLS O13535-0 |
| 496 | Protein | Ty1-like NLS O13658-0 |
| 497 | Protein | Ty1-like NLS O14064-0 |
| 498 | Protein | Ty1-like NLS O14076-0 |
| 499 | Protein | Ty1-like NLS O42668-0 |
| 500 | Protein | Ty1-like NLS O43068-0 |
| 501 | Protein | Ty1-like NLS O74777-0 |
| 502 | Protein | Ty1-like NLS O74862-0 |
| 503 | Protein | Ty1-like NLS O94383-0 |
| 504 | Protein | Ty1-like NLS O94487-0 |
| 505 | Protein | Ty1-like NLS O94585-0 |
| 506 | Protein | Ty1-like NLS O94652-0 |
| 507 | Protein | Ty1-like NLS P0C2I2-0 |
| 508 | Protein | Ty1-like NLS P0C2I3-0 |
| 509 | Protein | Ty1-like NLS P0C2I5-0 |
| 510 | Protein | Ty1-like NLS P0C2I6-0 |
| 511 | Protein | Ty1-like NLS P0C2I7-0 |
| 512 | Protein | Ty1-like NLS P0C2I9-0 |
| 513 | Protein | Ty1-like NLS P0C2J0-0 |
| 514 | Protein | Ty1-like NLS P0C2J1-0 |
| 515 | Protein | Ty1-like NLS P0C2J3-0 |
| 516 | Protein | Ty1-like NLS P0C2J5-0 |
| 517 | Protein | Ty1-like NLS P0CM98-0 |
| 518 | Protein | Ty1-like NLS P0CM99-0 |
| 519 | Protein | Ty1-like NLS P0CX63-0 |
| 520 | Protein | Ty1-like NLS P0CX64-0 |
| 521 | Protein | Ty1-like NLS P13902-0 |
| 522 | Protein | Ty1-like NLS P14746-0 |
| 523 | Protein | Ty1-like NLS P20484-0 |
| 524 | Protein | Ty1-like NLS P22936-0 |
| 525 | Protein | Ty1-like NLS P25384-0 |
| 526 | Protein | Ty1-like NLS P32597-0 |
| 527 | Protein | Ty1-like NLS P36006-0 |
| 528 | Protein | Ty1-like NLS P36080-0 |
| 529 | Protein | Ty1-like NLS P38112-0 |
| 530 | Protein | Ty1-like NLS P47098-0 |
| 531 | Protein | Ty1-like NLS P47100-0 |
| 532 | Protein | Ty1-like NLS P51599-0 |
| 533 | Protein | Ty1-like NLS P53119-0 |
| 534 | Protein | Ty1-like NLS P53123-0 |
| 535 | Protein | Ty1-like NLS P53125-0 |
| 536 | Protein | Ty1-like NLS Q01301-0 |
| 537 | Protein | Ty1-like NLS Q03434-0 |
| 538 | Protein | Ty1-like NLS Q03494-0 |
| 539 | Protein | Ty1-like NLS Q03612-0 |
| 540 | Protein | Ty1-like NLS Q03619-0 |
| 541 | Protein | Ty1-like NLS Q03707-0 |
| 542 | Protein | Ty1-like NLS Q03855-0 |
| 543 | Protein | Ty1-like NLS Q04214-0 |
| 544 | Protein | Ty1-like NLS Q04500-0 |
| 545 | Protein | Ty1-like NLS Q04670-0 |
| 546 | Protein | Ty1-like NLS Q04711-0 |
| 547 | Protein | Ty1-like NLS Q06132-0 |
| 548 | Protein | Ty1-like NLS Q07163-0 |
| 549 | Protein | Ty1-like NLS Q07509-0 |
| 550 | Protein | Ty1-like NLS Q07791-0 |
| 551 | Protein | Ty1-like NLS Q07793-0 |
| 552 | Protein | Ty1-like NLS Q09094-0 |
| 553 | Protein | Ty1-like NLS Q09180-0 |
| 554 | Protein | Ty1-like NLS Q09180-1 |
| 555 | Protein | Ty1-like NLS Q09180-2 |
| 556 | Protein | Ty1-like NLS Q09863-0 |
| 557 | Protein | Ty1-like NLS Q0U8V9-0 |
| 558 | Protein | Ty1-like NLS Q12088-0 |
| 559 | Protein | Ty1-like NLS Q12112-0 |
| 560 | Protein | Ty1-like NLS Q12113-0 |
| 561 | Protein | Ty1-like NLS Q12141-0 |
| 562 | Protein | Ty1-like NLS Q12193-0 |
| 563 | Protein | Ty1-like NLS Q12269-0 |
| 564 | Protein | Ty1-like NLS Q12273-0 |
| 565 | Protein | Ty1-like NLS Q12316-0 |
| 566 | Protein | Ty1-like NLS Q12337-0 |
| 567 | Protein | Ty1-like NLS Q12339-0 |
| 568 | Protein | Ty1-like NLS Q12414-0 |
| 569 | Protein | Ty1-like NLS Q12472-0 |
| 570 | Protein | Ty1-like NLS Q12490-0 |
| 571 | Protein | Ty1-like NLS Q12491-0 |
| 572 | Protein | Ty1-like NLS Q12501-0 |
| 573 | Protein | Ty1-like NLS Q1DNW5-0 |
| 574 | Protein | Ty1-like NLS Q1EA54-0 |
| 575 | Protein | Ty1-like NLS Q2HFA6-0 |
| 576 | Protein | Ty1-like NLS Q2HFA6-1 |
| 577 | Protein | Ty1-like NLS Q2UQI6-0 |
| 578 | Protein | Ty1-like NLS Q4HZ42-0 |
| 579 | Protein | Ty1-like NLS Q4P6I3-0 |
| 580 | Protein | Ty1-like NLS Q4WHF8-0 |
| 581 | Protein | Ty1-like NLS Q4WRV2-0 |
| 582 | Protein | Ty1-like NLS Q4WXQ7-0 |
| 583 | Protein | Ty1-like NLS Q5A2K0-0 |
| 584 | Protein | Ty1-like NLS Q5A310-0 |
| 585 | Protein | Ty1-like NLS Q5ACW8-0 |
| 586 | Protein | Ty1-like NLS Q5B6K3-0 |
| 587 | Protein | Ty1-like NLS Q6BXL7-0 |
| 588 | Protein | Ty1-like NLS Q6C1L3-0 |
| 589 | Protein | Ty1-like NLS Q6C233-0 |
| 590 | Protein | Ty1-like NLS Q6C2J1-0 |
| 591 | Protein | Ty1-like NLS Q6C7C0-0 |
| 592 | Protein | Ty1-like NLS Q6CJY0-0 |
| 593 | Protein | Ty1-like NLS Q6CJY0-1 |
| 594 | Protein | Ty1-like NLS Q6FML5-0 |
| 595 | Protein | Ty1-like NLS Q75F02-0 |
| 596 | Protein | Ty1-like NLS Q7S2A9-0 |
| 597 | Protein | Ty1-like NLS Q7S9J4-0 |
| 598 | Protein | Ty1-like NLS Q7SFJ3-0 |
| 599 | Protein | Ty1-like NLS Q875K1-0 |
| 600 | Protein | Ty1-like NLS Q8SUT1-0 |
| 601 | Protein | Ty1-like NLS Q8SVI7-0 |
| 602 | Protein | Ty1-like NLS Q8SVI7-1 |
| 603 | Protein | Ty1-like NLS Q92393-0 |
| 604 | Protein | Ty1-like NLS Q99109-0 |
| 605 | Protein | Ty1-like NLS Q99231-0 |
| 606 | Protein | Ty1-like NLS Q99337-0 |
| 607 | Protein | Ty1-like NLS Q9USK2-0 |
| 608 | Protein | Ty1-like NLS Q9UTQ5-0 |
| 609 | Protein | Ty1-like NLS A7MD48-0 |
| 610 | Protein | Ty1-like NLS O15446-0 |
| 611 | Protein | Ty1-like NLS O15446-1 |
| 612 | Protein | Ty1-like NLS O15446-2 |
| 613 | Protein | Ty1-like NLS O43148-0 |
| 614 | Protein | Ty1-like NLS O60271-0 |
| 615 | Protein | Ty1-like NLS O75128-0 |
| 616 | Protein | Ty1-like NLS O75400-0 |
| 617 | Protein | Ty1-like NLS O75691-0 |
| 618 | Protein | Ty1-like NLS O75937-0 |
| 619 | Protein | Ty1-like NLS O76021-0 |
| 620 | Protein | Ty1-like NLS O94964-0 |
| 621 | Protein | Ty1-like NLS P23497-0 |
| 622 | Protein | Ty1-like NLS P30414-0 |
| 623 | Protein | Ty1-like NLS P42081-0 |
| 624 | Protein | Ty1-like NLS P46100-0 |
| 625 | Protein | Ty1-like NLS P51608-0 |
| 626 | Protein | Ty1-like NLS P59797-0 |
| 627 | Protein | Ty1-like NLS P82979-0 |
| 628 | Protein | Ty1-like NLS Q12830-0 |
| 629 | Protein | Ty1-like NLS Q13409-0 |
| 630 | Protein | Ty1-like NLS Q13427-0 |
| 631 | Protein | Ty1-like NLS Q15361-0 |
| 632 | Protein | Ty1-like NLS Q15361-1 |
| 633 | Protein | Ty1-like NLS Q53SF7-0 |
| 634 | Protein | Ty1-like NLS Q5M9Q1-0 |
| 635 | Protein | Ty1-like NLS Q5T3I0-0 |
| 636 | Protein | Ty1-like NLS Q5T3I0-1 |
| 637 | Protein | Ty1-like NLS Q68D10-0 |
| 638 | Protein | Ty1-like NLS Q6IPR3-0 |
| 639 | Protein | Ty1-like NLS Q6PD62-0 |
| 640 | Protein | Ty1-like NLS Q6PD62-1 |
| 641 | Protein | Ty1-like NLS Q6PD62-2 |
| 642 | Protein | Ty1-like NLS Q6S8J7-0 |
| 643 | Protein | Ty1-like NLS Q6ZU65-0 |
| 644 | Protein | Ty1-like NLS Q7Z7B0-0 |
| 645 | Protein | Ty1-like NLS Q8N9E0-0 |
| 646 | Protein | Ty1-like NLS Q8NCU4-0 |
| 647 | Protein | Ty1-like NLS Q8NFU7-0 |
| 648 | Protein | Ty1-like NLS Q96DY2-0 |
| 649 | Protein | Ty1-like NLS Q96GD3-0 |
| 650 | Protein | Ty1-like NLS Q96P65-0 |
| 651 | Protein | Ty1-like NLS Q96QC0-0 |
| 652 | Protein | Ty1-like NLS Q9BQG0-0 |
| 653 | Protein | Ty1-like NLS Q9BQG0-1 |
| 654 | Protein | Ty1-like NLS Q9BRU9-0 |
| 655 | Protein | Ty1-like NLS Q9H0S4-0 |
| 656 | Protein | Ty1-like NLS Q9H6F5-0 |
| 657 | Protein | Ty1-like NLS Q9HCK1-0 |
| 658 | Protein | Ty1-like NLS Q9HCK8-0 |
| 659 | Protein | Ty1-like NLS Q9NPI1-0 |
| 660 | Protein | Ty1-like NLS Q9NSV4-0 |
| 661 | Protein | Ty1-like NLS Q9NUL3-0 |
| 662 | Protein | Ty1-like NLS Q9NWT1-0 |
| 663 | Protein | Ty1-like NLS Q9NX58-0 |
| 664 | Protein | Ty1-like NLS Q9UGU5-0 |
| 665 | Protein | Ty1-like NLS Q9UNS1-0 |
| 666 | Protein | Ty1-like NLS Q9Y2X3-0 |
| 667 | Protein | Ty1-like NLS Q9Y6X0-0 |
| 668 | Protein | Ty1-like NLS A0A 1I8M2I8-0 |
| 669 | Protein | Ty1-like NLS A1XDC0-0 |
| 670 | Protein | Ty1-like NLS A7S6A5-0 |
| 671 | Protein | Ty1-like NLS A8XI07-0 |
| 672 | Protein | Ty1-like NLS A8XI07-1 |
| 673 | Protein | Ty1-like NLS C0HKU9-0 |
| 674 | Protein | Ty1-like NLS C6KTD2-0 |
| 675 | Protein | Ty1-like NLS O16140-0 |
| 676 | Protein | Ty1-like NLS O17828-0 |
| 677 | Protein | Ty1-like NLS O17966-0 |
| 678 | Protein | Ty1-like NLS O44410-0 |
| 679 | Protein | Ty1-like NLS O44410-1 |
| 680 | Protein | Ty1-like NLS O45244-0 |
| 681 | Protein | Ty1-like NLS P0DP78-0 |
| 682 | Protein | Ty1-like NLS P0DP78-1 |
| 683 | Protein | Ty1-like NLS P0DP79-0 |
| 684 | Protein | Ty1-like NLS P0DP79-1 |
| 685 | Protein | Ty1-like NLS P0DP80-0 |
| 686 | Protein | Ty1-like NLS P0DP80-1 |
| 687 | Protein | Ty1-like NLS P0DP81-0 |
| 688 | Protein | Ty1-like NLS P0DP81-1 |
| 689 | Protein | Ty1-like NLS P14196-0 |
| 690 | Protein | Ty1-like NLS P22058-0 |
| 691 | Protein | Ty1-like NLS P26023-0 |
| 692 | Protein | Ty1-like NLS P26991-0 |
| 693 | Protein | Ty1-like NLS P35978-0 |
| 694 | Protein | Ty1-like NLS P46758-0 |
| 695 | Protein | Ty1-like NLS P46758-1 |
| 696 | Protein | Ty1-like NLS P46867-0 |
| 697 | Protein | Ty1-like NLS P54644-0 |
| 698 | Protein | Ty1-like NLS P54812-0 |
| 699 | Protein | Ty1-like NLS P83212-0 |
| 700 | Protein | Ty1-like NLS Q04621-0 |
| 701 | Protein | Ty1-like NLS Q08696-0 |
| 702 | Protein | Ty1-like NLS Q08696-1 |
| 703 | Protein | Ty1-like NLS Q08696-2 |
| 704 | Protein | Ty1-like NLS Q08696-3 |
| 705 | Protein | Ty1-like NLS Q08696-4 |
| 706 | Protein | Ty1-like NLS Q08696-5 |
| 707 | Protein | Ty1-like NLS Q08696-6 |
| 708 | Protein | Ty1-like NLS Q09223-0 |
| 709 | Protein | Ty1-like NLS Q09595-0 |
| 710 | Protein | Ty1-like NLS Q1ELU8-0 |
| 711 | Protein | Ty1-like NLS Q23120-0 |
| 712 | Protein | Ty1-like NLS Q23272-0 |
| 713 | Protein | Ty1-like NLS Q24537-0 |
| 714 | Protein | Ty1-like NLS Q27450-0 |
| 715 | Protein | Ty1-like NLS Q29DY1-0 |
| 716 | Protein | Ty1-like NLS Q4N4T9-0 |
| 717 | Protein | Ty1-like NLS Q54QQ2-0 |
| 718 | Protein | Ty1-like NLS Q54QQ2-1 |
| 719 | Protein | Ty1-like NLS Q54S20-0 |
| 720 | Protein | Ty1-like NLS Q54US6-0 |
| 721 | Protein | Ty1-like NLS Q54VU4-0 |
| 722 | Protein | Ty1-like NLS Q54XP6-0 |
| 723 | Protein | Ty1-like NLS Q551H0-0 |
| 724 | Protein | Ty1-like NLS Q557G1-0 |
| 725 | Protein | Ty1-like NLS Q55CE0-0 |
| 726 | Protein | Ty1-like NLS Q61R02-0 |
| 727 | Protein | Ty1-like NLS Q75JP5-0 |
| 728 | Protein | Ty1-like NLS Q8I5P7-0 |
| 729 | Protein | Ty1-like NLS Q8I5P7-1 |
| 730 | Protein | Ty1-like NLS Q8IBP1-0 |
| 731 | Protein | Ty1-like NLS Q8ILR9-0 |
| 732 | Protein | Ty1-like NLS Q93591-0 |
| 733 | Protein | Ty1-like NLS Q95Y36-0 |
| 734 | Protein | Ty1-like NLS Q9NBL2-0 |
| 735 | Protein | Ty1-like NLS Q9NDE8-0 |
| 736 | Protein | Ty1-like NLS Q9NDE8-1 |
| 737 | Protein | Ty1-like NLS Q9NDE8-2 |
| 738 | Protein | Ty1-like NLS Q9V5P6-0 |
| 739 | Protein | Ty1-like NLS Q9VDS6-0 |
| 740 | Protein | Ty1-like NLS Q9VGW1-0 |
| 741 | Protein | Ty1-like NLS Q9VH89-0 |
| 742 | Protein | Ty1-like NLS Q9VKM6-0 |
| 743 | Protein | Ty1-like NLS Q9VNH1-0 |
| 744 | Protein | Ty1-like NLS Q9W261-0 |
| 745 | Protein | Ty1-like NLS E1B7L7-0 |
| 746 | Protein | Ty1-like NLS Q08DU1-0 |
| 747 | Protein | Ty1-like NLS Q0III3-0 |
| 748 | Protein | Ty1-like NLS Q17QH9-0 |
| 749 | Protein | Ty1-like NLS Q29S22-0 |
| 750 | Protein | Ty1-like NLS Q2KIQ2-0 |
| 751 | Protein | Ty1-like NLS Q2KJE1-0 |
| 752 | Protein | Ty1-like NLS Q2KJE1-1 |
| 753 | Protein | Ty1-like NLS Q2TBX7-0 |
| 754 | Protein | Ty1-like NLS Q4R7K1-0 |
| 755 | Protein | Ty1-like NLS Q4R8Y5-0 |
| 756 | Protein | Ty1-like NLS Q58DE2-0 |
| 757 | Protein | Ty1-like NLS Q58DU0-0 |
| 758 | Protein | Ty1-like NLS Q5E9U4-0 |
| 759 | Protein | Ty1-like NLS Q5NVM2-0 |
| 760 | Protein | Ty1-like NLS Q5R4V4-0 |
| 761 | Protein | Ty1-like NLS Q5R8B0-0 |
| 762 | Protein | Ty1-like NLS Q5RB69-0 |
| 763 | Protein | Ty1-like NLS Q5RCE6-0 |
| 764 | Protein | Ty1-like NLS Q5TM61-0 |
| 765 | Protein | Ty1-like NLS Q767K9-0 |
| 766 | Protein | Ty1-like NLS Q7YQM3-0 |
| 767 | Protein | Ty1-like NLS Q7YQM4-0 |
| 768 | Protein | Ty1-like NLS Q7YR38-0 |
| 769 | Protein | Ty1-like NLS Q95KD7-0 |
| 770 | Protein | Ty1-like NLS Q95LG8-0 |
| 771 | Protein | Ty1-like NLS Q9N1Q7-0 |
| 772 | Protein | Ty1-like NLS A2WSD3-0 |
| 773 | Protein | Ty1-like NLS A2XVF7-0 |
| 774 | Protein | Ty1-like NLS A2XVF7-1 |
| 775 | Protein | Ty1-like NLS A2XVF7-2 |
| 776 | Protein | Ty1-like NLS A2XVF7-3 |
| 777 | Protein | Ty1-like NLS A3AVH5-0 |
| 778 | Protein | Ty1-like NLS A3AVH5-1 |
| 779 | Protein | Ty1-like NLS A3AVH5-2 |
| 780 | Protein | Ty1-like NLS A3AVH5-3 |
| 781 | Protein | Ty1-like NLS A4QJZ0-0 |
| 782 | Protein | Ty1-like NLS A4QK78-0 |
| 783 | Protein | Ty1-like NLS A4QKG5-0 |
| 784 | Protein | Ty1-like NLS A4QKQ3-0 |
| 785 | Protein | Ty1-like NLS A6MN03-0 |
| 786 | Protein | Ty1-like NLS A8MS85-0 |
| 787 | Protein | Ty1-like NLS A9XMT3-0 |
| 788 | Protein | Ty1-like NLS B8YIE8-0 |
| 789 | Protein | Ty1-like NLS F4HVZ5-0 |
| 790 | Protein | Ty1-like NLS F4IQK5-0 |
| 791 | Protein | Ty1-like NLS F4IQK5-1 |
| 792 | Protein | Ty1-like NLS O22812-0 |
| 793 | Protein | Ty1-like NLS O49323-0 |
| 794 | Protein | Ty1-like NLS O64571-0 |
| 795 | Protein | Ty1-like NLS O64639-0 |
| 796 | Protein | Ty1-like NLS O64639-1 |
| 797 | Protein | Ty1-like NLS O64639-2 |
| 798 | Protein | Ty1-like NLS O65743-0 |
| 799 | Protein | Ty1-like NLS O81072-0 |
| 800 | Protein | Ty1-like NLS P09975-0 |
| 801 | Protein | Ty1-like NLS P0C262-0 |
| 802 | Protein | Ty1-like NLS P29345-0 |
| 803 | Protein | Ty1-like NLS P50888-0 |
| 804 | Protein | Ty1-like NLS P51269-0 |
| 805 | Protein | Ty1-like NLS P51430-0 |
| 806 | Protein | Ty1-like NLS Q06FP6-0 |
| 807 | Protein | Ty1-like NLS Q06FP6-1 |
| 808 | Protein | Ty1-like NLS Q06FP6-2 |
| 809 | Protein | Ty1-like NLS Q06R72-0 |
| 810 | Protein | Ty1-like NLS Q06R98-0 |
| 811 | Protein | Ty1-like NLS Q1KVQ9-0 |
| 812 | Protein | Ty1-like NLS Q1XDL7-0 |
| 813 | Protein | Ty1-like NLS Q38873-0 |
| 814 | Protein | Ty1-like NLS Q3E8X3-0 |
| 815 | Protein | Ty1-like NLS Q3ZJ77-0 |
| 816 | Protein | Ty1-like NLS Q42438-0 |
| 817 | Protein | Ty1-like NLS Q4V3E0-0 |
| 818 | Protein | Ty1-like NLS Q66GN2-0 |
| 819 | Protein | Ty1-like NLS Q6K5K2-0 |
| 820 | Protein | Ty1-like NLS Q6YS30-0 |
| 821 | Protein | Ty1-like NLS Q84WK0-0 |
| 822 | Protein | Ty1-like NLS Q84Y18-0 |
| 823 | Protein | Ty1-like NLS Q8H991-0 |
| 824 | Protein | Ty1-like NLS Q8RWY7-0 |
| 825 | Protein | Ty1-like NLS Q8RWY7-1 |
| 826 | Protein | Ty1-like NLS Q8VZ67-0 |
| 827 | Protein | Ty1-like NLS Q8VZN4-0 |
| 828 | Protein | Ty1-like NLS Q8W0K2-0 |
| 829 | Protein | Ty1-like NLS Q8W490-0 |
| 830 | Protein | Ty1-like NLS Q9CAE4-0 |
| 831 | Protein | Ty1-like NLS Q9FMZ4-0 |
| 832 | Protein | Ty1-like NLS Q9FMZ4-1 |
| 833 | Protein | Ty1-like NLS Q9FRI0-0 |
| 834 | Protein | Ty1-like NLS Q9LKI5-0 |
| 835 | Protein | Ty1-like NLS Q9LUJ5-0 |
| 836 | Protein | Ty1-like NLS Q9LUR0-0 |
| 837 | Protein | Ty1-like NLS Q9LVU8-0 |
| 838 | Protein | Ty1-like NLS Q9LVU8-1 |
| 839 | Protein | Ty1-like NLS Q9LYK7-0 |
| 840 | Protein | Ty1-like NLS Q9M020-0 |
| 841 | Protein | Ty1-like NLS Q9M1L7-0 |
| 842 | Protein | Ty1-like NLS Q9M3V8-0 |
| 843 | Protein | Ty1-like NLS Q9SRQ3-0 |
| 844 | Protein | Ty1-like NLS Q9ZPV5-0 |
| 845 | Protein | Ty1-like NLS B1AQJ2-0 |
| 846 | Protein | Ty1-like NLS D3ZUI5-0 |
| 847 | Protein | Ty1-like NLS D4A666-0 |
| 848 | Protein | Ty1-like NLS E1U8D0-0 |
| 849 | Protein | Ty1-like NLS G3V8T1-0 |
| 850 | Protein | Ty1-like NLS O35821-0 |
| 851 | Protein | Ty1-like NLS O88487-0 |
| 852 | Protein | Ty1-like NLS O88665-0 |
| 853 | Protein | Ty1-like NLS P61364-0 |
| 854 | Protein | Ty1-like NLS P61365-0 |
| 855 | Protein | Ty1-like NLS P83858-0 |
| 856 | Protein | Ty1-like NLS P83861-0 |
| 857 | Protein | Ty1-like NLS Q00566-0 |
| 858 | Protein | Ty1-like NLS Q05CL8-0 |
| 859 | Protein | Ty1-like NLS Q09XV5-0 |
| 860 | Protein | Ty1-like NLS Q3TFK5-0 |
| 861 | Protein | Ty1-like NLS Q3TFK5-1 |
| 862 | Protein | Ty1-like NLS Q3TFK5-2 |
| 863 | Protein | Ty1-like NLS Q3TYA6-0 |
| 864 | Protein | Ty1-like NLS Q3UMF0-0 |
| 865 | Protein | Ty1-like NLS Q498U4-0 |
| 866 | Protein | Ty1-like NLS Q4V7C4-0 |
| 867 | Protein | Ty1-like NLS Q4V8G7-0 |
| 868 | Protein | Ty1-like NLS Q505I5-0 |
| 869 | Protein | Ty1-like NLS Q562C7-0 |
| 870 | Protein | Ty1-like NLS Q566R3-0 |
| 871 | Protein | Ty1-like NLS Q566R3-1 |
| 872 | Protein | Ty1-like NLS Q566R3-2 |
| 873 | Protein | Ty1-like NLS Q58A65-0 |
| 874 | Protein | Ty1-like NLS Q5NBX1-0 |
| 875 | Protein | Ty1-like NLS Q5XG71-0 |
| 876 | Protein | Ty1-like NLS Q5XI01-0 |
| 877 | Protein | Ty1-like NLS Q5XIB5-0 |
| 878 | Protein | Ty1-like NLS Q5XIR6-0 |
| 879 | Protein | Ty1-like NLS Q60848-0 |
| 880 | Protein | Ty1-like NLS Q62018-0 |
| 881 | Protein | Ty1-like NLS Q62018-1 |
| 882 | Protein | Ty1-like NLS Q62187-0 |
| 883 | Protein | Ty1-like NLS Q62871-0 |
| 884 | Protein | Ty1-like NLS Q63520-0 |
| 885 | Protein | Ty1-like NLS Q642C0-0 |
| 886 | Protein | Ty1-like NLS Q68SB1-0 |
| 887 | Protein | Ty1-like NLS Q6AYK5-0 |
| 888 | Protein | Ty1-like NLS Q6NZB0-0 |
| 889 | Protein | Ty1-like NLS Q76KJ5-0 |
| 890 | Protein | Ty1-like NLS Q76KJ5-1 |
| 891 | Protein | Ty1-like NLS Q76KJ5-2 |
| 892 | Protein | Ty1-like NLS Q78WZ7-0 |
| 893 | Protein | Ty1-like NLS Q78WZ7-1 |
| 894 | Protein | Ty1-like NLS Q7TNB4-0 |
| 895 | Protein | Ty1-like NLS Q7TPV4-0 |
| 896 | Protein | Ty1-like NLS Q80WC1-0 |
| 897 | Protein | Ty1-like NLS Q80Z37-0 |
| 898 | Protein | Ty1-like NLS Q811R2-0 |
| 899 | Protein | Ty1-like NLS Q8BKA3-0 |
| 900 | Protein | Ty1-like NLS Q8CJ67-0 |
| 901 | Protein | Ty1-like NLS Q8K214-0 |
| 902 | Protein | Ty1-like NLS Q8K4T4-0 |
| 903 | Protein | Ty1-like NLS Q8R5F3-0 |
| 904 | Protein | Ty1-like NLS Q91X13-0 |
| 905 | Protein | Ty1-like NLS Q9CS72-0 |
| 906 | Protein | Ty1-like NLS Q9CVI2-0 |
| 907 | Protein | Ty1-like NLS Q9CWX9-0 |
| 908 | Protein | Ty1-like NLS Q9CZX5-0 |
| 909 | Protein | Ty1-like NLS Q9D1J3-0 |
| 910 | Protein | Ty1-like NLS Q9D3V1-0 |
| 911 | Protein | Ty1-like NLS Q9DBQ9-0 |
| 912 | Protein | Ty1-like NLS Q9JIX5-0 |
| 913 | Protein | Ty1-like NLS Q9JJ80-0 |
| 914 | Protein | Ty1-like NLS Q9JJ89-0 |
| 915 | Protein | Ty1-like NLS Q9R1C7-0 |
| 916 | Protein | Ty1-like NLS Q9R1X4-0 |
| 917 | Protein | Ty1-like NLS Q9Z180-0 |
| 918 | Protein | Ty1-like NLS Q9Z207-0 |
| 919 | Protein | Ty1-like NLS Q9Z2D6-0 |
| 920 | Protein | Ty1-like NLS |
| | | A0A1L8GSA2-0 |
| 921 | Protein | Ty1-like NLS A0JP82-0 |
| 922 | Protein | Ty1-like NLS A1A5I1-0 |
| 923 | Protein | Ty1-like NLS A1L2T6-0 |
| 924 | Protein | Ty1-like NLS A2RUV0-0 |
| 925 | Protein | Ty1-like NLS A9JRD8-0 |
| 926 | Protein | Ty1-like NLS E7F568-0 |
| 927 | Protein | Ty1-like NLS F1QFU0-0 |
| 928 | Protein | Ty1-like NLS F1QWK4-0 |
| 929 | Protein | Ty1-like NLS K9JHZ4-0 |
| 930 | Protein | Ty1-like NLS P07193-0 |
| 931 | Protein | Ty1-like NLS P0CB65-0 |
| 932 | Protein | Ty1-like NLS P12957-0 |
| 933 | Protein | Ty1-like NLS P13505-0 |
| 934 | Protein | Ty1-like NLS P21783-0 |
| 935 | Protein | Ty1-like NLS Q28BS0-0 |
| 936 | Protein | Ty1-like NLS Q28BS0-1 |
| 937 | Protein | Ty1-like NLS Q28G05-0 |
| 938 | Protein | Ty1-like NLS Q32N87-0 |
| 939 | Protein | Ty1-like NLS Q3KPW4-0 |
| 940 | Protein | Ty1-like NLS Q4QR29-0 |
| 941 | Protein | Ty1-like NLS Q4QR29-1 |
| 942 | Protein | Ty1-like NLS Q5BL56-0 |
| 943 | Protein | Ty1-like NLS Q5XJK9-0 |
| 944 | Protein | Ty1-like NLS Q5ZIJ0-0 |
| 945 | Protein | Ty1-like NLS Q640I9-0 |
| 946 | Protein | Ty1-like NLS Q6DEU9-0 |
| 947 | Protein | Ty1-like NLS Q6DEU9-1 |
| 948 | Protein | Ty1-like NLS Q6DEU9-2 |
| 949 | Protein | Ty1-like NLS Q6DK85-0 |
| 950 | Protein | Ty1-like NLS Q6DRI7-0 |
| 951 | Protein | Ty1-like NLS Q6DRL5-0 |
| 952 | Protein | Ty1-like NLS Q6NV26-0 |
| 953 | Protein | Ty1-like NLS Q6NWI1-0 |
| 954 | Protein | Ty1-like NLS Q6NYJ3-0 |
| 955 | Protein | Ty1-like NLS Q6P4K1-0 |
| 956 | Protein | Ty1-like NLS Q6WKW9-0 |
| 957 | Protein | Ty1-like NLS Q7ZUF2-0 |
| 958 | Protein | Ty1-like NLS Q7ZW47-0 |
| 959 | Protein | Ty1-like NLS Q7ZXZ0-0 |
| 960 | Protein | Ty1-like NLS Q7ZXZ0-1 |
| 961 | Protein | Ty1-like NLS Q7ZYR8-0 |
| 962 | Protein | Ty1-like NLS Q8AVQ6-0 |
| 963 | Protein | Ty1-like NLS Q9DE07-0 |
| 964 | Protein | Ty1-like NLS P03086-0 |
| 965 | Protein | Ty1-like NLS P09814-0 |
| 966 | Protein | Ty1-like NLS P0CK10-0 |
| 967 | Protein | Ty1-like NLS P15075-0 |
| 968 | Protein | Ty1-like NLS P51724-0 |
| 969 | Protein | Ty1-like NLS P52344-0 |
| 970 | Protein | Ty1-like NLS P52531-0 |
| 971 | Protein | Ty1-like NLS Q5UP41-0 |
| 972 | Protein | Ty1-like NLS Q9DUC0-0 |
| 973 | Protein | Ty1-like NLS Q9XJS3-0 |

### EXPERIMENTAL EXAMPLES

[0337] The disclosure is further described in detail by reference to the following experimental examples. These examples are provided for purposes of illustration only and are not intended to be limiting unless otherwise specified. Thus, the disclosure should in no way be construed as being limited to the following examples, but rather, should be construed to encompass any and all variations which become evident as a result of the teaching provided herein.

[0338] Without further description, it is believed that one of ordinary skill in the art can, using the preceding description and the following illustrative examples, make and utilize the present disclosure and practice the claimed methods. The following working examples, therefore, specifically point out certain embodiments of the present disclosure, and are not to be construed as limiting in any way the remainder of the disclosure.

### Example 1: Enhanced Nuclear Localization of Retroviral Integrase-dCas9 Fusion Proteins for Editing of Mammalian Genomic DNA

[0339] Efficient CRISPR-Cas9 editing of mammalian genomic DNA requires the nuclear localization of Cas9, a large, bacterial RNA-guided endonuclease that normally functions in prokaryotic cells lacking nuclear membranes. Efficient nuclear localization of Cas9 in mammalian cells has been shown to require the addition of at least two mammalian nuclear localization signals, one located at the N-terminus and one at the C-terminus (Cong et al., 2013, Science 339:819-23).

[0340] To promote nuclear localization of the retroviral Integrase-dCas9 fusion proteins for editing, an N-terminal SV40 NLS was included on Integrase, in addition to a C-terminal SV40 NLS on dCas9 (FIG. 1A). Surprisingly, when expressed in mammalian cells, only a small fraction of the IN-dCas9 fusion proteins were nuclear localized, as detected using a FLAG antibody recognizing the C-terminal 3×FLAG epitope on dCas9 (FIG. 1). Interestingly while the full-length IN-dCas9 fusion protein gave rise to cytoplasmic aggregates, deletion of the C-terminal domain of Integrase (INΔC) resulted in greater solubility and increased nuclear localization (FIG. 1).

[0341] The fusion of retroviral Integrase to dCas9 appears to dramatically decrease its ability to localize to the nucleus. To further enhance the nuclear localization of IntegrasedCas9 fusion proteins, a number of different mammalian nuclear localization sequences were tested for their ability to direct IN-dCas9 nuclear import (FIG. 1). Multimerizing 3 copies of the SV40 NLS (3×SV40) had no apparent effect on the degree of nuclear localization of IN-dCas9 or INΔC-dCas9. However, the addition of the bipartite NLS from Nucleoplasmin (NPM) provided increased nuclear localization of the INΔC-dCas9 fusion protein, but not that of the full-length IN fusion protein. The combination of the 3×SV40 and NPM NLS appeared similar to NPM alone.

[0342] Interestingly, yeast LTR-retrotransposons (for example Ty1) are the evolutionary ancestors of retroviruses and replicate their genomes through reverse transcription of an RNA intermediate in the cytoplasm (Curcio et al., 2015, Microbiol Spectr 3:MDNA3-0053-2014). LTR-retrotransposons contain an integrase enzyme, which is required for the insertion of the retrotransposon genome. As opposed to higher eukaryotes which undergo open mitosis during cell division, yeast undergo closed mitosis, whereby their nuclear envelope remains intact. Thus, for Ty1 biogenesis, nuclear import of the integrase/retrotransposon genome complex requires active nuclear import. Thus, in contrast to mammalian Integrase enzymes, the Ty1 integrase contains a large C-terminal bipartite NLS which is required for retrotransposition (Moore et al., 1998, Mol Cell Biol 18:1105-14). Interestingly, the results presented herein demonstrate that fusion of the Ty1 NLS to the C-terminus of both IN-dCas9 fusion proteins provided robust nuclear localization in mammalian cells (FIG. 1i).

[0343] The increased nuclear localization of INΔC-dCas9 fusion protein significantly enhanced editing in dividing mammalian cells in culture. The addition of the Ty1 NLS enhanced the activity of INΔC-dCas9 fusion protein to integrate an IRES-mCherry template targeted to the 3′UTRE of EF1-alpha in HEK293 cells (FIG. 1C). Utilizing the robust Ty1 NLS may further allow for editing in non-dividing cells, which always maintain a nuclear envelope (for example, in vivo therapeutic applications).

### Example 2: An Integrated Gene Editing Approach for the Correction of Muscular Dystrophy

[0344] As demonstrated elsewhere herein, fusion of lentiviral Integrase to CRISPR-Cas9 allows for the sequence-specific integration of large DNA sequences into genomic DNA. This approach can be utilized for the delivery of therapeutically beneficial genes to non-pathogenic genomic locations (safe harbors) for the permanent correction of human genetic diseases (FIG. 2). This technology allows for the sequence-specific integration of large DNA donor sequences containing short viral end motifs.

[0345] The major advantage of the gene therapy approach of the disclosure is the ability to deliver donor DNA sequences to targeted genome locations. Further, this approach eliminates the need for homology arms and relies on targeting by guide-RNAs, greatly simplifying genome editing. Thus, once a specific reporter donor sequence is generated, it can be guided to any location (or multiple locations) for diverse applications.

[0346] Fusion of lentiviral Integrase to dCas9 is sufficient to insert donor DNA sequences containing short viral termini to target sequences using CRISPR guide-RNAs in mammalian cells (FIG. 3). To monitor Integrase-Cas-mediated integration in mammalian cells, donor vector containing the IGR IRES sequence followed by an mCherry-2a-puromycin gene and an SV40 polyadenylation sequence were generated (FIG. 3). Next, sgRNAs targeting a stable human CMV-eGFP stable cell line in COS-7 cells were designed. The hCMV-eGFP stable transgene provided a heterologous target sequence which can be used to determine editing at a robustly expressed but non-essential expression locus. Donor mCherry-2a-puro templates were purified and co-transfected with sgRNAs and IN-dCas9 into the GFP stable cells and cultured for 48 hours. After 48 hours, mCherry-positive cells were visible in culture and replaced the GFP positive signal (FIG. 3).

Efficacy and Fidelity of Integrase-Cas-Mediated Integration of Human Dystrophin into Mammalian Genomes.

[0347] Integrase-Cas-mediated gene delivery directs the sequence-specific integration of large DNA sequences into mammalian genomic DNA. Integrase-Cas is used to deliver the human Dystrophin gene under the control of the Human α-Skeletal Actin (HSA) promoter to safe harbor locations using CRISPR guide-RNAs specific to human AAVS1 and mouse ROSA26 genomic DNA in cultured cells. Correct targeting of Dystrophin is assessed using PCR-based genotyping.

### Integrase-Cas-Mediated Dystrophin Gene Therapy Restores Muscle Function in a Mouse Model of Duchenne Muscular Dystrophy.

[0348] The efficacy of Inscritpr-mediated delivery of human Dystrophin is determined in the MDX mouse line, the most commonly used mouse model for muscular dystrophy. Following systemic delivery, the levels of dystrophin expression are quantified and measured in limb skeletal muscle, heart and diaphragm using an anti-dystrophin antibody over a time-course of 2, 4 and 6 months. Mitigation of DMD disease pathogenesis is assessed by quantifying the levels of serum Creatine Kinase (CK) (a marker of skeletal muscle damage and diagnostic marker for DMD patients), grip strength and histological analyses of limb skeletal muscle, heart and diaphragm.

### Histological Analyses of Gene Expression.

[0349] At 8 weeks of age, left hindlimb quadriceps muscle, heart, and diaphragm are harvested, weighed and fixed in 4% formaldehyde in PBS and processed using routine methods for paraffin histology. The percentage of myofibers expressing the H4SA-dystrophin/GFP fusion protein is performed using an anti-GFP antibody in both DMD^{Mdx/y} and WT mice. The right hindlimb muscles are flash frozen in liquid nitrogen for subsequent PCR-based genotyping, gene expression by RT-PCR and protein expression analyses by western blot.

### Integrase-Cas-Mediated Delivery Mitigates Disease Pathogenesis in a Mouse Model of Duschenne Muscular Dystrophy.

[0350] Haematoxylin and eosin (H&E), von Kossa and Masson's trichrome staining of transverse histological sections is used to identify myofibers containing centralized nuclei, mineralization and endomysial fibrosis, respectively. Quantitative comparisons and statistical analyses are used to compare the ratio of myofibers with centralized nuclei or compare the area of mineralization or fibrosis that is stained in quadriceps limb muscle. At least three different sectional planes are compared for each muscle, from 3 different mice of each genotype. Integrsae-Cas treated Dmd^{mdx/y} which mice show a less severe phenotype, have decreased ratio of myofibers with centralized nuclei and less total area of fibrosis and mineralization.

### Serum Creatine Kinase (CK) Measurements.

[0351] Serum CK is a correlated marker of skeletal muscle damage and diagnostic marker for DMD patients. CK measurements are performed at 2, 4, 6, and 8 weeks on the above cohort of animals using non-lethal procedures. Briefly, blood ia harvested from the periorbital vascular plexus directly into microhematocrit tubes, allowed to clot at room temperature for 30 minutes and then centrifuged at 1,700×g for 10 minutes. Treated mice showing a less severe phenotype than Dmd^{mdx/y} KO, have significantly decreased serum CK levels,

### Example 3: Genome Editing—Directed Non-Homologous DNA Integration

[0352] The data presented herein demonstrates optimized Integrase-Cas to enable efficient editing of mammalian genomes.

### Optimized Editing

[0353] To optimize IN-mediated integration, it is determined whether amino acid mutations that enhance Integrase catalytic activity, solubility, or interaction with host cellular cofactors enhance editing. Further, the efficiency and fidelity of IN proteins isolated from the seven unique classes of retrovirus are evaluated.

[0354] To quantify and characterize IN-dCas9 mediated integration in mammalian cells, a plasmid-based reporter system is used that utilizes the blue chromoprotein from the coral Acropora millepora (amilCP), which produces dark blue colonies when expressed in Escherichia coli. Disruption of the amilCP open reading frame abolishes blue protein expression, which can be used as a direct readout for targeting fidelity. Further, a donor template encoding the chloramphenicol antibiotic resistance gene, flanked by the U3 and U5 retroviral end sequences from HIV was generated. Integration of this donor template confers resistance to chloramphenicol, which can be utilized to monitor Integrase-Cas-mediated DNA integration. In this reporter assay, expression plasmids containing the IN-dCas9 fusion protein, sgRNAs targeting amilCP and donor template are co-transfected into mammalian COS-7 cells with the bacterial amilCP reporter. After 48 hours, total plasmid DNA is recovered using column purification and transformed into E. coli. IN-dCas9 is sufficient to integrate the chloramphenicol encoding template DNA into the amilCP reporter plasmid, thereby disrupting amilCP expression and conferring resistance to chloramphenicol. This rapid assay, which allows for quantification and clonal sequence analysis of individual integration events, is used for optimizing editing.

[0355] Enhancing Integrase Activity: While most mutations within IN abolish its activity, decades of past research have identified a few mutations which enhance IN integration by increasing IN catalytic activity (D116N), dimerization (E85F), solubility (F185K/C280S) and interaction with host cellular proteins (K71R). IN-dCas9 fusion proteins containing activating IN mutations are used to determine if this enhances activity using the plasmid-based reporter assay.

[0356] Modification of Integrase activity by host cellular proteins: While IN is the only protein necessary and sufficient to integrate proviral DNA in vitro, interactions with host cellular proteins can greatly alter IN-mediated DNA integration18. Notably, LEDGF/p75, VBP1, and SNF5 are a well-characterized HIV IN interacting proteins which can promote IN-mediated integration. These factors are expressed using the plasmid reporter assay to determine if they enhance donor template integration.

[0357] Compare and contrast Integrases from different retroviral classes: While all IN enzymes from retroviral classes contain the conserved core catalytic D,D(35)E residues, they differ greatly in genome size, complexity, U3 and U5 terminal sequences and DNA joining efficiencies. To determine the editing efficiencies of different retroviral INs, model examples from each retroviral class are cloned as a fusion to dCas9, including Alpha (RSV), Beta (MMTV), Gamma (MoLV), Delta (BLV), Epsilon (WDSV) and Spumavirus (HFV). Donor plasmids are generated containing their respective U3 and U5 terminal motifs. Protein expression is verified by western blot and nuclear localization is verified using immunocytochemistry using a FLAG antibody to detect the 3×FLAG epitope located on the C-terminus of dCas9.

### Efficiency of Editing of Mammalian Genomic DNA

[0358] The efficacy and fidelity of editing of mammalian genomic DNA is determined using a stable CMV-driven GFP reporter cell-line and generate a donor template containing an RFP and puromycin selection cassette. Integration events are quantified and clonally characterized to determine the efficacy and fidelity of the method as a novel genome editing technology.

[0359] Generation of a cell-based reporter assay: To quantify integration events at this locus, a donor template is used containing an IRES-RFP-2A-puromycin cassette and guide-RNAs targeting the GFP coding sequence. Upon insertion of the donor cassette into the CMV-GFP locus, RFP expression replaces GFP expression and provides resistance to the antibiotic puromycin. The efficiency and fidelity of Inscripr editing is quantified using FACS sorting to determine the percentage of cells that are RFP+/GFP−(targeted integration) after transfection and 48 hours of culture. Puromycin is used to select for clonal integration events, which is characterized using PCR primers to amplify the sequences between the GFP locus and the donor cassette.

[0360] Editing at multiple endogenous loci: Integrase-Cas is used to knock-in the RFP-2Apuromycin cassette using sgRNAs specific to the CMV-GFP locus and to the 3′UTR of the human EF1-alpha locus in the HEK293 human cell line. Targeting the 3′UTR allows for expression of the IRES-dependent vector, while not disrupting normal gene expression. After clonal selection using puromycin, PCR-genotyping is used to determine the percentage of clones that have integrated the donor template at both loci.

### Example 4: Generation and Characterization of IN-dCas9

### Generation of a Functional IN-dCas9 Fusion Protein.

[0361] To generate a functional IN-dCas9 fusion protein for use in mammalian cells, full-length retroviral IN was cloned from HIV-1 (amino acids 1148-1435 of the gag-pol polyprotein), separated by a flexible 15 amino acid linker [(GGGGS)3)] to the N-terminus of human codon-optimized dCas9 (FIG. 6). An SV40 nuclear localization signal (NLS) was included at the N-terminus of IN, which together with the C-terminal SV40 NLS on dCas9, provided nuclear localization of the IN-dCas9 fusion protein. To generate an IN-dCas9 fusion lacking the C-terminal non-specific DNA binding domain, an additional construct was generated containing only the N-terminal and catalytic core domains of IN (a.a. 1148-1369) as an N-terminal fusion to dCas9 (FIG. 6).

### Generation of a Reporter for Monitoring Editing of Plasmid DNA.

[0362] To quantify and characterize IN-dCas9 mediated integration in mammalian cells, a plasmid-based reporter assay was designed that utilizes the blue chromoprotein from the coral Acropora millepora (amilCP), which produces dark blue colonies when expressed in Escherichia coli (FIG. 6). Disruption of the amilCP open reading frame abolishes blue protein expression, which can be used as a direct readout for targeting fidelity and as a target DNA for Integrase-Cas-mediated integration. Single guide-RNA (sgRNA) target sequences were designed with a ‘PAM-out’ orientation separated by 16 bp spacer sequence, to promote efficient dimerization of the N-terminal dCas9 fusion protein at target DNA (FIG. 4).

### Generation of a Viral-End Donor Sequences for Integrase-Cas-Mediated Integration.

[0363] To construct a targeting vector that could be used to generate donor sequences for Integrase-Cas-mediated integration, the 30 base pairs encompassing the U3 and U5 HIV termini were subcloned into pCRII (FIG. 6). To facilitate subcloning of donor sequences, a multiple cloning site containing 9 unique restriction enzymes was included between U3 and U5. Since U3 and U5 share the same 3 nucleotides at their termini (ACT and AGT respectively) additional half-site sequences were included to generate ScaI restrictions sites at each end that could be used to generate bluntend donor sequences from the plasmid backbone (FIG. 6). Additionally, flanking Type IIS restriction enzyme sites were included for FauI, which cuts and leaves a two 5′ nucleotide overhang, mimicking the 3′ pre-processed viral end with exposed CA dinucleotide (FIG. 6). To aid in the gel purification and separation of FauI-digested templates from plasmid backbone, multisite directed mutagenesis was used to remove the six FauI sites present in the pCR II plasmid backbone.

### Protocol: Preparing INsrt Donor Templates for Transfection

[0364] 1) Set up restriction digest of INsrt plasmid DNA
[0365] 2) Restriction digest reaction
[0366] 3) Gel purify the donor template from backbone DNA
[0367] 4) Eluted Donor DNA for transfection.
   Integrase-Cas-Mediated Integration of Donor Sequences into Plasmid DNA in Mammalian Cells.

[0368] To allow for positive selection of concerted IN-dCas9-mediated integration, a INsrt donor vector was designed carrying the chloramphenicol resistance gene (CAT), which is not present in the reporter of expression plasmids (FIG. 7). The IGR IRES from the Plautia stali intestine virus (PSIV) was included in front of the CAT gene, which can initiate translation in both prokaryote and eukaryote cells, to aid in translation at multiple sites of integration. Templates containing the chloramphenicol resistance gene and viral termini were digested using either ScaI (Blunt ends) or FauI (processed ends) and gel purified from plasmid backbone DNA. Co-transfection of the INsrt templates, the IN-dCas9 vectors targeting the amilCP sequence were co-transfected into Cos7 cells (FIG. 7). After 48 hours, total plasmid DNA was recovered using column purification and transformed into E. coli. Chloramphenicol resistance clones were observed for both full length IN and INDC-dCas9 fusion proteins. Sequencing of the plasmids revealed the IG3-CAT plasmid sequence had integrated into the amilCP reporter. Interestingly, the use of FauI digested donor sequences, which mimic pre-3′processing of viral DNA ends, resulted in twice as many chloramphenicol resistance clones compared to ScaI digested bluntend templates. Integrase-Cas-mediated integration contained hallmarks of HIV IN lentiviral integration, including a 5 base pair repeat of host DNA flanking the integration site. Interestingly, the integration site did not occur between the two sgRNA target sites but occurred on either side of the amilCP target sequence.

[0369] Integration of Insrt IGR-CAT donor template with either blunt ends (ScaI cleaved) or 3′ Processing mimic (FauI cleaved) ends into pCRII-amilCP reporter in mammalian cells. Interestingly, deletion of the C-terminal non-specific DNA binding domain, as a fusion to dCas9, does not inhibit Integrase-Cas mediated integration. Use of ends that mimic 3′ Processing show ˜2 fold increase in CAT resistant clones. (FIG. 29B) Dimerization inhibiting mutations (E85G and E85F) do not disrupt Integrase-Cas-mediated integration using double guide-RNA targeted integration of IGR-CAT donor template into amilCP. However, the IN E87G mutation cannot be rescued by paired targeting sgRNAs. Interestingly, a tandem INΔC fusion to dCas9 (tdINΔC-dCas9) shows ˜2 fold enhanced integration (FIG. 29C).

Protocol: Integrase-Cas-Mediated Integration of Donor Sequences into Plasmid DNA in Mammalian Cells
[0370] 1) Co-transfect the multicistronic sgRNA and IN-dCas9 plasmid, bacterial amilCP reporter plasmid and INsrt donor template into mammalian (ex. Cos7) cells.
   [0371] a. Set up transfection reaction immediately before plating cells.
   [0372] b. Harvest and plate and transfect cells
[0373] 2) Recover plasmid DNA from transfected cells:
[0374] 3) Transform recovered plasmid DNA into chemically competent E. coli.
   Generation of a CMV-GFP Stable Mammalian Cell Line for Integrase-Cas-Mediated Integration into Genomic DNA.

[0375] A stable GFP reporter cell line was generated that can be used to quantify and characterize the fidelity of individual integration events in mammalian cells (FIG. 3). A plasmid encoding GFP under the control of the human CMV promoter (pcDNA3.1-GFP) was linearized and transfected into Cos7 cells and stable clones were selected using G418 and serial dilution. This artificial locus allows for robust gene expression which can be targeted for disruption without compromising the normal cell viability, which otherwise could occur when targeting an essential host gene.

Integrase-Cas-Mediated Integration of Donor Sequences into Mammalian Genomic DNA.

[0376] To quantify integration events at the CMV-GFP locus, a donor template was constructed containing an IGR-mCherry-2A-puromycin-pA cassette and paired guide-RNAs targeting the GFP coding sequence (FIG. 3). Integration of the donor cassette into the CMV-GFP locus will drive mCherry expression and disrupt GFP expression and provide resistance to the antibiotic puromycin. After transfection and 48 hours of culture, mCherry-positive cells were observed, some of which still contained weak but detectable levels of GFP expression (FIG. 3).

### Integrase-Cas-Mediated Integration of Donor Sequences at an Endogenous Locus.

[0377] A targeting strategy was designed and guide-RNAs specific the 3′UTR of the human EF1-alpha locus were selected to knock-in the IGR-mCherry-2A-puromycin-pA cassette into the human HEK293 cell line (FIG. 8). The 3′UTR was targeted to allow for expression of the IGR-mCherry cassette, while not disrupting the open reading frame of the EF1-alpha expression. After transfection and 48 hours of culture, mCherry-positive cells were observed in culture (FIG. 8).

Protocol: Integrase-Cas-Mediated Integration of Donor Sequences into Mammalian Genomic DNA
[0378] 1) Co-transfect plasmids encoding sgRNAs, IN-dCas9 and INsrt donor template 1:1:1 into mammalian cells (COS7, HEK293, etc) using Fugene6 or Lipofectamine2000.
   [0379] a. Harvest, plate, and transfect cells.
[0380] 2) Antibiotic Selection for integrated sequences
   [0381] a. Wash cells with and plate in 10 mls of media containing antibiotic selection
   [0382] b. Culture cells, then generate clones.

### Directional Editing.

[0383] IN-mediated integration of DNA sequences can occur in either direction in a target DNA sequence. Utilizing different combinations of Cas and IN retroviral class proteins provides the ability to promote direction editing. For example, a fusion of IN from BIV (Bovine Immunodeficiency virus, or other HIV related virus) fused to catalytically dead LbCpf1 (LbCpf1) allows for binding to a specific target sequence utilizing a Cpf1-specific guide-RNA. Utilizing a donor sequence containing both HIV and BIV terminal sequences lock binding to a single orientation with the target DNA. (FIG. 9).

### Multiplex Genome Editing for the Generation of Floxed Alleles.

[0384] The incorporation of flanking LoxP (Floxed) sequences around a gene of interest allows for CRE-mediated recombination and conditional mutagenesis. Current methods to generate Floxed alleles using CRISPR-Cas9 are inefficient. The most widely utilized approach is to use two guide-RNAs to induce DNA cleavage at flanking target sequences and Homology Direct Repair to insert ssDNA templates containing LoxP sequences. However, when using double sgRNAs to induce cleavage, the most favorable reaction is the deletion of intervening sequence, resulting in global gene deletion. The use of Integrase-Cas-mediated gene insertion provides an alternative and more efficient approach for tandem insertion of DNA sequences if IN-mediated strand transfer with host DNA does not allow for efficient deletion of intervening sequences. Since IN-mediated integration may occur in either the direction, Integration of a sequence containing inverted LoxP sequences allows for recombination of flanking LoxP sequences (FIG. 10).

### Example 5: Identification and Activity of Ty1 NLS-Like Sequences

[0385] The integrase enzyme from the yeast Ty1 retrotransposon contains a non-classical bipartite nuclear localization signal, comprised of tandem KKR motifs separated by a larger linker sequence. Previous studies in yeast have demonstrated the necessity of these basic motifs for nuclear localization and Ty1 transposition (Kenna et al., 1998, Mol Cell Biol 18, 1115-1124; Moore et al., 1998, Mol Cell Biol 18, 1105-1114). Ty1 transposition is absolutely dependent on the presence of the Ty1 NLS, and interestingly, a classic NLS is insufficient to recapitulate Ty1 NLS activity required for transposition. Interestingly, additional yeast proteins share this tandem KKR motif, which may serve to function as an NLS given that many of these proteins are nuclear localized (Kenna et al., 1998, Mol Cell Biol 18, 1115-1124).

[0386] As demonstrated in Example 1, the yeast Ty1 NLS provides robust nuclear localization of Cas proteins and Cas-fusion proteins in mammalian cells. To determine if this activity is a unique feature of the Ty1 NLS, it was tested whether the closely related NLS from Ty2 Integrase and other yeast Ty1 NLS-like motifs were sufficient to localize an Integrase-dCas9 fusion protein (INΔC-Cas9) to the nucleus in mammalian cells. Interestingly, the Ty2 NLS, which is highly conserved to the Ty1 NLS, was equally as efficient for nuclear localization as the Ty1 NLS (FIG. 11). Fusion of three different Ty1 NLS-like sequences identified in yeast (Kenna et al., 1998), which diverge from Ty1/Ty2 NLS sequences, showed either robust NLS activity (MAK11) or no apparent NLS activity (INO4 and STH1). The MAK11 sequence is derived from a yeast nuclear protein, which also occurs at the C-terminus of the protein were further screen, suggesting this sequence indeed functions as NLS. All proteins in the SWISS-PROT Protein Sequence Databank using the motif KKR_{N20-40}KKR, which identified a large number of potential Ty1 NLS-like sequences across diverse species (SEQ ID NOs:275-887). These data demonstrate that other Ty1 NLS-like sequences may have robust NLS activities and maybe useful for localization of proteins (including Cas and Cas-fusion proteins) in dividing and non-dividing eukaryotic cells.

### Example 6: Enhanced CRISPR-Cas9 DNA Editing with the Ty1 NLS

[0387] CRISPR-Cas DNA cleavage systems are derived from bacteria and Cas proteins are both large and lack intrinsic mammalian nuclear localization signals (NLSs), preventing their efficient nuclear localization in mammalian cells. Previously it has been shown that the addition of two classical nuclear localization signals (an N-terminal SV40 and C-terminal nucleoplasmin (NPM) bi-partite NLS) were required for efficient nuclear localization and editing of DNA by CRISPR-Cas9 in mammalian cells (Cong et al., 2013, Science 339, 819-823). Due to the robust nature of the non-classical yeast retrotransposon Ty1 NLS for localizing Cas fusion proteins in mammalian cells (Example 1), it was tested whether the Ty1 NLS could also function to enhance the editing efficiency of traditional CRISPR-Cas9 in mammalian cells.

[0388] To determine if Ty1 enhances CRISPR-Cas9 editing, an existing CRISPR-Cas9 expression plasmid (px330) was modified by replacing the C-terminal NPM NLS with the non-classical Ty1 NLS (px330-Ty1) (FIG. 12A). Next, a frameshift-responsive luciferase reporter was generated, which encodes an out-of-frame luciferase coding sequence downstream of a target sequence (ts) (FIG. 12B). For this reporter assay, cleavage near the target sequence and imperfect repair by the cellular non-homologous end joining (NHEJ) pathway can induce nucleotide insertions or deletions which have the potential to re-frame the luciferase coding sequence and result in luciferase expression.

[0389] Co-expression of the Luciferase reporter with a vector encoding Cas9 containing the NPM NLS and a single guide-RNA specific to a 20 nucleotide target sequence resulted in a ˜20-fold increase in luciferase activity over background, relative to a non-targeting guide-RNA (FIG. 12C). Notably, expression of Cas9 containing the Ty1 NLS resulted in a significant (˜44%) enhancement in reporter activity in COS-7 cells, compared to Cas9 containing the NPM NLS (FIG. 12C).

### Example 7: Genome Targeting Strategies for Editing

[0390] Targeted integration of DNA donor sequences using an Integrase-DNA-binding fusion protein can be targeted to different locations within the genome depending upon the desired outcomes. For example, therapeutic DNA Donor sequences consisting of a gene expression cassette (ex, promoter, gene sequence and transcriptional terminator) may be targeted to ‘safe harbor’ locations (for review and list of safe harbor sites in the human genome, see Pellenz et al., 2019, Hum Gene Ther 30, 814-828), which would allow for expression of a therapeutic gene without affecting neighbor gene expression. These may include intergenic regions apart from neighbor genes ex. H11, or within ‘non-essential’ genes, ex. CCR5, hROSA26 or AAVS1 (FIGS. 13A and 13b).

[0391] To restore expression of a disease causing gene mutation, targeted integration of a therapeutic gene sequence into the endogenous disease gene locus may be advantageous, since this locus is already defective and the spatial and temporal expression of this locus is under endogenous regulatory control. In one iteration, a DNA donor sequence encoding a therapeutic gene containing a splice acceptor could be integrated into the first intron of the endogenous gene locus, such that splicing would 1) allow for expression of the introduced gene sequence and 2) prevent downstream expression of the mutated sequence (due to termination from an integrated poly(A) sequence or LTR sequence (FIG. 13C). Smaller DNA donor sequences could be delivered or expressed if this is targeted to a downstream intron (FIG. 13D).

[0392] Targeted insertion of a DNA donor sequence containing an IRES sequence into a 3′ untranslated region (3′UTR) of a gene may be beneficial in that this approach would allow for expression in the same spatial and temporal expression as the targeted locus and would be less likely to disrupt the targeted gene locus (FIG. 13E).

### Example 8: Targeted Lentiviral Integration into Mammalian Genomes Using CRISPR-CAS

[0393] The data presented herein demonstrates three different approaches for the delivery and targeted integration of lentiviral donor sequences into mammalian genomes.

### Lentivirus Life Cycle

[0394] Lentiviruses are single-stranded RNA viruses which integrate a permanent double-stranded DNA (dsDNA) copy of their proviral genomes into host cellular DNA (FIG. 14). Lentiviral genomes are flanked by long terminal repeat (LTR) sequences which control viral gene transcription and contain short (˜20 base pair) sequence motifs at their U3 and U5 termini required for proviral genome integration. Subsequent to viral infection, lentiviral RNA genomes are copied as blunt-ended dsDNA by viral-encoded reverse transcriptase (RT) and inserted into host genomes by Integrase (IN). IN consists of three functional domains which are essential for IN activity, including a C-terminal domain that binds non-specifically to DNA (CTD). IN-mediated insertion of retroviral DNA occurs with little DNA target sequence specificity and can integrate into active gene loci, which can disrupt normal gene function and has the potential to cause disease in humans. This limits the utility of lentiviral vectors for gene therapy, despite the benefits of a large sequence carrying capacity.

### Genome Editing

[0395] CRISPR-Cas9 allows for programmable DNA targeting by utilizing short single guide-RNAs to recognize and bind DNA. Catalytically inactive Cas9 (dCas9) retains the ability to target DNA and has been recently repurposed as a programmable DNA binding platform for diverse applications for genome interrogation and regulation. As demonstrated in example 1, fusion of lentiviral Integrase to dCas9 is sufficient to insert donor DNA sequences containing short viral termini to target sequences using CRISPR guide-RNAs in mammalian cells (FIG. 15). To monitor Integrase-Cas-mediated integration in mammalian cells, donor vector were generated containing the IGR IRES sequence followed by an mCherry-2a-puromycin gene and an SV40 polyadenylation sequence (FIG. 15B). sgRNAs targeting a stable human CMV-eGFP stable cell line in COS-7 cells were designed (FIGS. 15C and 15D). The hCMV-eGFP stable transgene provided a heterologous target sequence which can be used to determine editing at a robustly expressed but non-essential expression locus. Donor mCherry-2a-puro templates were purified and co-transfected with sgRNAs and IN-dCas9 into the GFP stable cells and cultured for 48 hours. After 48 hours, mCherry-positive cells were visible in culture and replaced the GFP positive signal (FIG. 15E). Incorporating editing components (Integrase-CRISPR-Cas9 fusions) into lentiviral particles allows for targeted and readily programmable lentiviral genome integration into host DNA, thereby eliminating a major limitation of lentiviral gene therapy (i.e. non-specific lentiviral integration). This approach is useful for both basic research and therapeutic applications.

### Lentiviral Gene Delivery Systems

[0396] Lentiviral vectors have been adapted as robust gene delivery tools for research applications (FIG. 16). Lentiviral structural and enzymes proteins are transcribed and translated as large polyproteins (gag-pol and envelope) (FIG. 16A). Upon incorporation into budding viral particles, the polyproteins are processed by viral protease into individual proteins. For lentiviral vector gene expression systems, theses polyproteins are removed from the viral genome and expressed using separate mammalian expression plasmids (FIG. 16B). Donor DNA sequences of interest can then be cloned in place of viral polyproteins between the flanking LTR sequences. Co-transfection of these vectors in mammalian cells allows for the formation of lentiviral particles capable of delivering and integrating the encoded donor sequence, however do not require the coding information for Integrase and other viral proteins necessary for subsequent viral propagation (FIG. 16B). Lentiviral particles are a natural vector for the delivery of both viral proteins (ex. integrase and reverse transcriptase) and dsDNA donor sequences, which contain the necessary viral end sequences required for integrase-mediated insertion into mammalian cells (FIG. 16C).

Packaging the Integrase-dCas9 Fusion Protein into Lentiviral Particles.

[0397] Existing lentiviral delivery systems can be modified to incorporate editing components for the purpose of targeted lentiviral donor template integration for genome editing in mammalian cells (FIGS. 17-20). Described herein are three different approaches for the delivery and targeted integration of lentiviral donor sequences into mammalian genomes.

[0398] The first approach is to incorporate dCas9 directly as a fusion to Integrase (or to Integrase lacking its C-terminal non-specific DNA binding domain, INAC) within a lentiviral packaging plasmid (ex. psPax2) encoding the gag-pol polyprotein (FIG. 17A). In this approach, the modified gag-pol polyprotein is translated with other viral components as a polyprotein, loaded with guide-RNA and packaged into lentiviral particles (FIG. 4B). The Integrase-dCas9 fusion protein retains the sequences necessary for protease cleavage (PR), and thus is cleaved normally from the gag-pol polyprotein during particle maturation. Transduction of mammalian cells results in the delivery of viral proteins, including the IN-dCas9 fusion protein, sgRNA, and lentiviral donor sequence. Reverse transcription of the ssRNA genome by reverse transcriptase generates a dsDNA sequence containing correct viral end sequences (U3 and U5) which is then Integrated into mammalian genomes by the IN-dCas9 fusion protein.

[0399] A second approach is to generate N-terminal and C-terminal fusions of Integrase-dCas9 with the HIV viral protein R (VPR) (FIG. 18A). VPR is efficiently packaged as an accessory protein into lentiviral particles and has been used to package heterologous proteins (e.x. GFP) into lentiviral particles. A viral protease cleavage sequence is included between VPR and the IN-dCas9 fusion protein, so that after maturation, the IN-dCas9 is freed from VPR (FIG. 18A). Co-transfection of packaging cells with lentiviral components generates viral particles containing the VPR-IN-dCas9 protein and sgRNA. The packaging plasmid required for viral particle formation (ex. psPax2) contains a mutation within Integrase to inhibit its catalytic activity, thereby preventing non-mediated integration (FIG. 18B). Upon viral transduction, the Integrase-dCas9 protein is delivered and mediate the integration of the lentiviral donor sequences (FIG. 18C). The benefit to delivery of the IN-dCas9 fusion and sgRNA as a riboprotein is that it is only transiently expressed in the target cell.

[0400] A third method is to incorporate the Integrase-dCas9 fusion protein and sgRNA expression cassettes directly within a lentiviral transfer plasmid, or other viral vector (such as AAV) (FIG. 19A). The transfer plasmid containing the IN-dCas9 fusion protein and sgRNA is co-transfected with packaging and envelope plasmids required to generate lentiviral particles. If using a lentivirus, the packaging plasmid contains a catalytic mutation within Integrase to inhibit non-specific integration (FIG. 19B). Upon transduction of a mammalian cell, expression of the IN-dCas9 fusion protein and sgRNA generate components capable of targeting its own viral donor vector for targeted integration (self-integration) (FIG. 19C). This method is used for targeted gene disruption or as a gene drive. Alternatively, co-transduction with an additional lentiviral particle encoding a donor sequence serves as the integrated donor template (FIG. 19). Prevention of self-integration of its own viral encoding sequence in this approach is achieved by using Integrase enzymes from different retroviral family members and their corresponding transfer plasmids. For example, an HIV lentiviral particle encoding an FIV IN-dCas9 fusion protein is utilized to integrate an FIV donor template encoded within an FIV lentiviral particle (FIG. 20).

### Generation of a Single Locus, Constitutively Active, Ubiquitous ROSA26^{mGFP/+} Reporter Mouse Line

[0401] The ROSA26 mT/mG reporter mouse line (Jackson Labs, Stock #007576) contains a floxed, membrane localized tdTO (mT) fluorescent reporter cassette, which when recombined with a CRE recombinase, results in removal of a mT reporter and allows for expression of a membrane localized eGFP (mG) reporter. To generate a single locus, in vivo GFP reporter line, ROSA26 mT/mG mice were crossed with a universal CAG-CRE recombinase mouse to generate a constitutively and ubiquitously expressed ROSA26 mG reporter mouse. Isolation of mouse embryonic fibroblasts (MEFs) from heterozygous ROSA26^{mG/+} mice revealed robust membrane GFP expression in all cells in culture (FIG. 21). A similar strategy is utilized to generate a ubiquitous and constitutively active nuclear GFP reporter by recombining the ROSA26 nT/nG mouse strain (Jackson Labs, Stock #023035).

Packaging of Components into Lentiviral Particles for Targeted Integration into the ROSA-mGFP Locus.

[0402] For targeted integration of an IRES-tdTO sequence into the GFP coding sequence in ROSA26^{mG/+} MEFs, lentiviral particles were generated in a packaging cell line (Lenti-X 293T, Clontech). Lentiviral particles were generated by co-transfection of a lentiviral transfer plasmid encoding an IRES-tdTO fluorescent reporter between an 2^{nd} generation SIN lentiviral LTRs (Lenti-IRES-tdTO), an expression vector encoding a pantropic envelope protein (VSV-G), expression plasmid encoding inverted pair of GFP-targeting guide-RNAs, and a packing plasmid encoding an INΔC-dCas9 fusion in the context of the Gag-Pol lentiviral polyprotein in the psPax2 packing plasmid (INΔC-dCas9-psPax2). Lentiviral particles were harvested from supernatant, filtered using 0.45 μm PES filter.

### Targeted Lentiviral Integration in Mammalian Cells

[0403] Incriptr-modified lentiviral particles were used to transduce ROSA26^{mG/+} MEFs in culture. After two days, ubiquitous red fluorescent protein expression was detectable in MEFs transduced with lentivirus encoding the IRES-tdTO reporter but retained GFP fluorescence. This initial broad expression is likely due to translation of the lentiviral IRES-tdTO encoded viral RNA and demonstrates that lentiviral packaging was not inhibited by modifications in the packaging plasmid (FIG. 21). For traditional lentiviral transduction, in the absence of viral integration, lentivirus transgene expression is not maintained. Remarkably, seven days post-transduction, tdTO red fluorescent cells were detectable in in culture, which now lacked green fluorescence in ROSA26^{mG/+} primary cells (FIG. 21) or when targeted into our previously described CMV-GFP COS-7 table cell line (FIG. 22). These data demonstrate that fusion of Integrase (lacking a C-terminal DNA binding domain) to catalytically dead Cas9 in the context of the Gag-Pol lentiviral polyprotein allows for lentiviral packaging, delivery and targeting of lentiviral encoded donor sequences in mammalian cells. Further, these data suggest that expression of guide-RNAs in lentiviral packaging cells are sufficient for incorporation into lentiviral particles, which may occur through the strong interaction with dCas9. Alternative approaches to deliver guide-RNAs into lentiviral particles may enhance targeted integration, for example, through constitutive expression of the guide-RNA(s) in the transfer plasmid, etc.

### Alternative DNA Binding Domains for Targeted Integration of Lentiviral Particles.

[0404] This data has demonstrated that replacement of the non-specific DNA binding domain of Integrase with the programmable DNA binding domain of dCas9, allows for targeted integration of dsDNA donor templates, or via delivery in lentiviral particles, for delivery of lentiviral encoded donor sequences. CRISPR-Cas systems are two-component, relying on both a Cas protein and small guide-RNA for targeting. In some instances, it may beneficial to utilize single-component DNA targeting proteins, such as TALENs, for delivery via lentiviral particles, as these are targeted solely by the encoded protein. Using a similar lentiviral production approach, replacement of dCas9 in previous packaging strategies with TALENs targeting a given sequence (for example, eGFP or a safe harbor locus), allows for lentiviral packaging and targeting without the requirement for delivery of guide-RNAs (FIG. 23). For example, TALENs are packed and delivered as a fusion to Integrase either in the context of the gag-pol polyprotein (FIG. 23A), the IN-TALEN as a fusion to a viral incorporated protein, such as VPR (FIG. 23B), or the IN-TALEN delivered within the transfer plasmid (FIG. 23C).

### Example 9: Enhanced CRISPR-Cas9 DNA Editing with the Ty1 NLS

[0405] CRISPR-Cas DNA cleavage systems are derived from bacteria and Cas proteins are both large and lack intrinsic mammalian nuclear localization signals (NLSs), preventing their efficient nuclear localization in mammalian cells.

[0406] To determine if Ty1 enhances CRISPR-Cas9 editing, CRISPR-Cas9 an existing expression plasmid (px330) was modified by replacing the C-terminal NPM NLS with the non-classical Ty1 NLS (px330-Ty1) (FIG. 24A). Next a frameshift-repsonsive luciferase reporter was generated, which encodes an out-of-frame luciferase coding sequence downstream of a target sequence (ts)(FIG. 24B). For this reporter assay, cleavage near the target sequence and imperfect repair by the cellular non-homologous end joining (NHEJ) pathway can induce nucleotide insertions or deletions which have the potential to re-frame the luciferase coding sequence and result in luciferase expression.

[0407] Co-expression of the Luciferase reporter with a vector encoding Cas9 containing the NPM NLS and a single guide-RNA specific to a 20 nucleotide target sequence resulted in a ˜20-fold increase in luciferase activity over background, relative to a non-targeting guide-RNA (FIG. 24C). Notably, expression of Cas9 containing the Ty1 NLS resulted in a significant (˜44%) enhancement in reporter activity in COS-7 cells, compared to Cas9 containing the NPM NLS (FIG. 24C).

### Example 10: Non-Homologous DNA Integration with Integrase-TALEN Fusion Proteins

[0408] Transcription Activator-like Effector Nucleases (TALENs) are a well-studied programmable DNA binding proteins which are constructed by the tandem assembly of individual nucleotide-targeting domains (Reyon et al., 2012). In a similar approach demonstrated for Cas-IN fusions, TALENs can be utilized to direct retroviral integrase-mediated integration of a donor DNA template (FIG. 25). To generate TALEN-Integrase fusion proteins, mammalian expression vectors were constructed to receive TALEN targeting repeats from TALEN expression vectors previously described, to generate either IN-TALEN or TALEN-IN fusions. Each fusion protein incorporated a 3×FLAG epitope, a Ty1 NLS, and a TALEN repeat separated by a linker sequence between HIV Integrase lacking the C-terminal non-specific DNA binding domain (INΔC). In some instances, IN mutations can be incorporated to alter IN activity, dimerization, interaction with cellular proteins, resistance to dimerization inhibitors or tandem copies of INΔC (tdINΔC). For example, the E85G mutation can be incorporated to inhibit obligate dimer formation.

[0409] TALEN pairs targeting eGFP have been previously described and verified for targeting efficiency (Reyon et al., 2012; available from Addgene). TALEN pairs (ClaI/BamHI fragment) were subcloned to generate TALEN-IN fusion proteins directed to eGFP with spacers either of 16 bp or 28 bp in length.

[0410] Using a plasmid DNA integration assay (FIG. 26), co-transfection of TALEN-IN pairs targeting eGFP, a linear double stranded DNA donor sequence encoding a IGR-CAT resistance gene and an amilCP bacterial expression reporter were co-transfected into mammalian COS-7 cells. Two days post-transfection, edited plasmids were recovered from mammalian cells and transformed into E. coli and selected for on chloramphenicol plates. Interestingly, a TALEN pair separated by 16 bp resulted in ˜6 fold more Chloramphenicol-resistant colonies, whereas a TALEN pair separated by 28 bp was similar to untargeted integrase (FIG. 27). These data suggest that proximity of TALEN pairs is important for targeting and integration, a feature which has been previously reported for TALEN-FokI mediated dsDNA cleavage.

### Example 11: Construction and In Vitro Validation of Cas-IN Fusion-Targeting of Safe Harbor Sites for Delivery and Expression in Mouse and Human Cells

[0411] Human Frataxin lentiviral vectors are generated, under the control of ubiquitous promoter (EF1a), cardiac specific (Cardiac troponin T, cTnT), brain specific (hSYN1), or a novel promoter which will be useful for expression of FXN in major therapeutically beneficial tissues, such as brain (CNS and PNS) heart and skeletal muscle (EF1a2). A second vector encoding FXN with a fluorescent protein and selection marker is generated to aid in selection and validation of expression and delivery. These lentiviral vectors can serve as both gene transfer plasmid for both traditional lentiviral transduction, as well as for Cas-IN fusion-mediated gene targeting (FIG. 30).

[0412] Paired single CRISPR guide RNAs (for Cas-IN fusion) and TALEN pairs (Cas-TALEN) are designed and validated for Cas-IN or Cas-TALEN fusion mediated targeting of mouse safe harbor (ROSA26 GFP) or human safe harbor (AAVS1) sites.

[0413] Safe harbor sites are validated first in mammalian plasmid-based integration assay (editing and recovery of plasmids in mammalian cells for clonal analysis), followed by direct genome editing of mouse and human cells lines.

[0414] Cas-IN-targeted clones are isolated for whole genome sequencing to identify/compare on-target/off-target accuracy and efficiency using different guide-RNA and TALEN pairs for mouse and human safe harbor sites.

### Example 12: Correction of Friedreich's Ataxia Using Cas-IN or Cas-TALENS Fusion Mediated Frataxin Gene Therapy

### Design and Validation of Lentiviral Particles Suitable for Delivery and Expression of FXN to Therapeutically Beneficial Tissues for FA

[0415] As described in Example 11, promoters driving expression of a reporter gene in tissues affected by FA are in vivo in WT mice for specificity and expression levels using RT-PCR, immunohistochemistry and western blot across different tissues.

[0416] The well-characterized envelope spike VSV-G is used to pseudotype lentiviral vectors for broad delivery and expression to in vivo cell types. Spike envelope proteins from SARS-CoV-2 are also tested for tissue specific transduction.

### Assessment of Cas-IN Fusion Gene Targeting of FXN in Mouse Model of FA

[0417] Mice containing a conditional floxed FXN allele (Jackson Labs) are crossed with tissue specific Cre reporter mice to knockout FXN expression in the heart. Echocardiography, histological and gene expression analyses are performed to validate disease phenotype.

[0418] Lentiviral particles encoding FXN gene transfer cassette and Cas-IN enzyme protein are delivered via systemic injection at postnatal day 6 neonates. Saline is injected as control, as well as traditional lentivirus encoding WT Integrase with identical FXN expression cassette. Four, six and ten weeks post-injection, non-invasive echocardiography is performed to determine cardiac output, including ejection fraction, fractional shortening and chamber volume. Hearts are isolated and processed for histological, gene expression and sequencing analyses.

### Example 13: Promoters for Tissue Specific Expression in Heart, Skeletal Muscle, CNS and PNS

[0419] The promoter sequence for Eukaryotic Translation Elongation Factor 1 alpha 1 (EEF1a1/EF1a) is among the most commonly used promoters to drive constitutive, robust and widespread gene expression for viral transgene therapies (Uetsuki et al. 1989; Kim et al. 1990). The small core promoter of EF1a, consisting of only 213 base pairs (bp), retains similar promoter activity and its small size is useful for packaging limited vectors, such as AAV.

[0420] Tissue specific promoters are commonly employed to drive gene expression in a subset of tissues for efficacy and to reduce exogenous expression in unwanted tissues. These are often specific for singles tissue types, such as heart and skeletal muscle, liver, or CNS, etc. However, for targeting tissues affected by neuromuscular diseases, it is necessary to express transgenes in all affected tissues, such as heart and skeletal muscle and central and peripheral nervous tissues. Interestingly, EEF1A2 (EF1A2), a paralog of EF1A1, is robustly and specifically expressed in heart, skeletal muscle and neural tissues, such as brain and motor neurons (Lee et al. 1992). This promoter sequence, or smaller core promoter sequence, may similarly be employed to drive strong and constitutive gene expression in these tissues for treating neuromuscular diseases.

[0421] Further, selective mutation of transcription factor enhancer binding sequences could also serve to selectively drive expression in more narrow tissue or cell-type.

### Example 14: Fusion of Integrase to the Compact Catalytically Dead Cas14 (dCas14) for Cas-IN-Mediated Gene Integration

[0422] The large size of spCas9 has hindered the efficiency by which it can be delivered using viral vectors. Recently, programmable miniature CRISPR-Cas14 (CRISPR-Cas12f) RNA-guided nucleases, ranging in size from 400 to 700 amino acids, have been discovered in Archea (Harrington et al. 2018; Karvelis et al. 2020). The small, yet readily programmable nature of CRISPR-Cas14 systems may be useful as a fusion to lentiviral integrase (IN) for non-homologous gene integration. Similar to CRISPR-Cas9, CRISPR-Cas14 utilizes two RNAs to guide target recognition and cleavage, a tracrRNA and CRISPR RNA cRNA. Fusion of these two RNAs into a single guide RNA (sgRNA) has been shown to be functional for targeted cleavage in vitro and in bacteria. However, the tracrRNA contains a stretch of consecutive stretch of 5 T's, which functions as a termination sequence recognized by Pol III promoters, commonly used to drive guide RNA expression in mammalian cells. This sequence will likely prevent guide RNA expression in mammalian cells (FIG. 31).

[0423] To quantify the activity of CRISPR-Cas14 in mammalian cells, a mammalian frame-shift activated luciferase reporter was generated, which contains a validated Cas14 target sequence with 5′ PAM upstream of an out-of-frame luciferase open reading frame. In this assay, cleavage of the target sequence in mammalian cells results in imperfect NHEJ repair of the FAR reporter and in some instances re-framing and expression of the luciferase reporter. As predicted, expression of the WT Cas14 sgRNA was not able to activate the luciferase reporter when co-expressed with an active Cas14, fused to the strong Ty1 nuclear localization signal. However, mutation of residues to break up the internal Pol III termination T stretch, or truncation of the sgRNA to remove the T stretch, resulted in detectable activation of the luciferase reporter in mammalian cells (FIG. 32). These data demonstrate that Cas14 sgRNAs with specific mutations to disrupt premature termination can be utilized for CRISPR-Cas14 DNA targeting in mammalian cells.

[0424] The disclosures of each and every patent, patent application, and publication cited herein are hereby incorporated herein by reference in their entirety.

[0425] While this disclosure has been disclosed with reference to specific embodiments, it is apparent that other embodiments and variations of this invention may be devised by others skilled in the art without departing from the true spirit and scope of the invention. The appended claims are intended to be construed to include all such embodiments and equivalent variations.

What is claimed is:

1. A method of treating Friedreich's Ataxia in a subject, the method comprising administering:
a) a fusion protein comprising a retroviral integrase (IN) or a fragment thereof, a CRISPR-associated (Cas) protein, and a nuclear localization signal (NLS) or a nucleic acid molecule comprising one or more nucleic acid sequences encoding a retroviral integrase (IN) or a fragment thereof, a CRISPR-associated (Cas) protein, and a nuclear localization signal (NLS);
b) a guide nucleic acid comprising a targeting nucleotide sequence complimentary to a target region in the genome of the subject;
c) a donor template nucleic acid comprising a U3 sequence, a U5 sequence and a donor template sequence, wherein the donor template sequence comprises a nucleic acid sequence encoding frataxin.

2. The method of claim 1, wherein the retroviral IN is selected from the group consisting of human immunodeficiency virus (HIV) IN, Rous sarcoma virus (RSV) IN, Mouse mammary tumor virus (MMTV) IN, Moloney murine leukemia virus (MoLV) IN, bovine leukemia virus (BLV) IN, Human T-lymphotropic virus (HTLV) IN, avian sarcoma leukosis virus (ASLV) IN, feline leukemia virus (FLV) IN, xenotropic murine leukemia virus-related virus (XMLV) IN, simian immunodeficiency virus (SIV) IN, feline immunodeficiency virus (FIV) IN, equine infectious anemia virus (EIAV) IN, Prototype foamy virus (PFV) IN, simian foamy virus (SFV) IN, human foamy virus (HFV) IN, walleye dermal sarcoma virus (WDSV) IN, and bovine immunodeficiency virus (BIV) IN.

3. The method of any of claims 1-2, wherein the IN comprises a sequence at least 70% identical to one of SEQ ID NOs:9-48.

4. The method of any of claims 1-2, wherein the Cas protein is selected from the group consisting of Cas9, Cas14, and Cpf1.

5. The method of any of claims 1-4, wherein the Cas protein comprises a sequence at least 70% identical to one of SEQ ID NOs:1-8.

6. The method of any of claims 1-5, the Cas protein is catalytically deficient (dCas).

7. The method of claim 6 wherein the Cas protein comprises a sequence at least 70% identical to one of SEQ ID NOs:2, 4, 6, and 8.

8. The method of any of claims 1-7, wherein the NLS is a Ty1 or Ty2 NLS.

9. The method of any of claims 1-8, wherein the NLS comprises a sequence at least 70% identical to one of SEQ ID NOs:53-54 and 361-973.

10. The method of any of claims 1-9, wherein the target region in the genome of the subject is a safe harbor site.

11. The method of any of claims 1-10, wherein the donor template sequence encodes a protein at least 70% identical to SEQ ID NO:357.

12. The method of any of claims 1-11, wherein the donor template sequence comprises a sequence at least 70% identical to SEQ ID NO:358.

13. The method of any of claims 1-12, wherein the IN is HIV IN and the donor template sequence comprise a U3 sequence of SEQ ID NO:258, a U5 sequence of SEQ ID NO: 259, or both.

14. A fusion protein comprising:
a) a CRISPR-associated (Cas) 14 protein; and
b) a nuclear localization signal (NLS).

15. The fusion protein of claim 14, the Cas14 protein comprises a sequence at least 70% identical to one of SEQ ID NOs:7-8.

16. The fusion protein of any of claims 14-15, wherein the NLS is a Ty1 or Ty2 NLS.

17. The fusion protein of any of claims 14-16, wherein the NLS comprises a sequence at least 70% identical to one of SEQ ID NOs:53-54 and 361-973.

18. The fusion protein of any of claims 14-16, wherein the fusion protein comprises a sequence at least 70% identical to SEQ ID NO:145.

19. The fusion protein of any of claims 14-18, wherein the fusion protein further comprises a retroviral integrase (IN) or a fragment thereof.

20. The fusion protein of claim 19, wherein the IN comprises a sequence at least 70% identical to one of SEQ ID NOs:9-48

21. The fusion protein of any of claims 19-20, wherein the Cas14 protein is catalytically deficient (dCas).

22. The fusion protein of any of claims 19-20, wherein the fusion protein comprises a sequence at least 70% identical to one of SEQ ID NOs:63-102 and 146.

23. A nucleic acid molecule comprising a nucleic acid sequence encoding the fusion protein of any of claims 14-22.

24. A method of editing genetic material, the method comprising administering to the genetic material:
a) the fusion protein of any of claims 14-22 or the nucleic acid molecule of any of claim 23;
b) a guide nucleic acid comprising a targeting nucleotide sequence complimentary to a target region in the genetic material; and
c) a donor template nucleic acid comprising a U3 sequence, a U5 sequence and a donor template sequence.

25. The method of claim 24, wherein the guide nucleic acid comprises a tracrRNA and as CRISPR RNA (crRNA).

26. The method of claim 25, wherein the tracrRNA comprises a sequence at least 70% identical to one of SEQ ID NOs: 336-339.

27. A system for editing genetic material, comprising in one or more vectors:
a) a nucleic acid sequence encoding a fusion protein comprising a CRISPR-associated (Cas) 14 protein, and a nuclear localization signal (NLS);
b) a nucleic acid sequence coding a CRISPR-Cas system guide RNA; and
c) a nucleic acid sequence coding a donor template nucleic acid, wherein the donor template nucleic acid comprises a U3 sequence, a U5 sequence and a donor template sequence.

28. The system of claim 27, wherein the Cas14 protein comprises a sequence at least 70% identical to one of SEQ ID NOs:7-8.

29. The system of any of claims 27-28, wherein the NLS is a Ty1 or Ty2 NLS.

30. The system of any of claims 27-29, wherein the NLS comprises a sequence at least 70% identical to one of SEQ ID NOs:53-54 and 361-973.

31. The system of any of claims 27-30, wherein the Cas14 protein is catalytically deficient (dCas).

32. The system protein of any of claims 27-31, wherein the fusion protein further comprises a retroviral integrase (IN) or a fragment thereof.

33. The system protein of claim 32, wherein the IN comprises a sequence at least 70% identical to one of SEQ ID NOs:9-48

34. The system protein of any of claims 32-33, wherein the Cas14 protein is catalytically deficient (dCas).

35. The system protein of any of claims 32-33, wherein the fusion protein comprises a sequence at least 70% identical to one of SEQ ID NOs: 63-102 and 146.

36. The system of any of claims 27-30, wherein the fusion protein comprises a sequence at least 70% identical to SEQ ID NO:145.

37. The system of any of claims 27-36, wherein the guide RNA comprises a tracrRNA and a CRISPR RNA (crRNA).

38. The system of claim 27, wherein the tracrRNA comprises a sequence at least 70% identical to one of SEQ ID NOs: 336-339.

The application's sequence listing, which the Patent Office published only in electronic form, follows.

SEQUENCE LISTING (973 sequences)

SEQ ID NO: 1 - protein, 1367 aa, Artificial Sequence
  chemically synthesized
DKKYSIGLDIGTNSVGWAVITDEYKVPSKKFKVLGNTDRHSIKKNLIGALLFDSGETAEATRLKRTARRRYTRRKNRICYLQEIFSNEMAKVDDSFFHRLEESFLVEEDKKHERHPIFGNIVDEVAYHEKYPTIYHLRKKLVDSTDKADLRLIYLALAHMIKFRGHFLIEGDLNPDNSDVDKLFIQLVQTYNQLFEENPINASGVDAKAILSARLSKSRRLENLIAQLPGEKKNGLFGNLIALSLGLTPNFKSNFDLAEDAKLQLSKDTYDDDLDNLLAQIGDQYADLFLAAKNLSDAILLSDILRVNTEITKAPLSASMIKRYDEHHQDLTLLKALVRQQLPEKYKEIFFDQSKNGYAGYIDGGASQEEFYKFIKPILEKMDGTEELLVKLNREDLLRKQRTFDNGSIPHQIHLGELHAILRRQEDFYPFLKDNREKIEKILTFRIPYYVGPLARGNSRFAWMTRKSEETITPWNFEEVVDKGASAQSFIERMTNFDKNLPNEKVLPKHSLLYEYFTVYNELTKVKYVTEGMRKPAFLSGEQKKAIVDLLFKTNRKVTVKQLKEDYFKKIECFDSVEISGVEDRFNASLGTYHDLLKIIKDKDFLDNEENEDILEDIVLTLTLFEDREMIEERLKTYAHLFDDKVMKQLKRRRYTGWGRLSRKLINGIRDKQSGKTILDFLKSDGFANRNFMQLIHDDSLTFKEDIQKAQVSGQGDSLHEHIANLAGSPAIKKGILQTVKVVDELVKVMGRHKPENIVIEMARENQTTQKGQKNSRERMKRIEEGIKELGSQILKEHPVENTQLQNEKLYLYYLQNGRDMYVDQELDINRLSDYDVDHIVPQSFLKDDSIDNKVLTRSDKNRGKSDNVPSEEVVKKMKNYWRQLLNAKLITQRKFDNLTKAERGGLSELDKAGFIKRQLVETRQITKHVAQILDSRMNTKYDENDKLIREVKVITLKSKLVSDFRKDFQFYKVREINNYHHAHDAYLNAVVGTALIKKYPKLESEFVYGDYKVYDVRKMIAKSEQEIGKATAKYFFYSNIMNFFKTEITLANGEIRKRPLIETNGETGEIVWDKGRDFATVRKVLSMPQVNIVKKTEVQTGGFSKESILPKRNSDKLIARKKDWDPKKYGGFDSPTVAYSVLVVAKVEKGKSKKLKSVKELLGITIMERSSFEKNPIDFLEAKGYKEVKKDLIIKLPKYSLFELENGRKRMLASAGELQKGNELALPSKYVNFLYLASHYEKLKGSPEDNEQKQLFVEQHKHYLDEIIEQISEFSKRVILADANLDKVLSAYNKHRDKPIREQAENIIHLFTLTNLGAPAAFKYFDTTIDRKRYTSTKEVLDATLIHQSITGLYETRIDLSQLGGD

SEQ ID NO: 2 - protein, 1367 aa, Artificial Sequence
  chemically synthesized
DKKYSIGLAIGTNSVGWAVITDEYKVPSKKFKVLGNTDRHSIKKNLIGALLFDSGETAEATRLKRTARRRYTRRKNRICYLQEIFSNEMAKVDDSFFHRLEESFLVEEDKKHERHPIFGNIVDEVAYHEKYPTIYHLRKKLVDSTDKADLRLIYLALAHMIKFRGHFLIEGDLNPDNSDVDKLFIQLVQTYNQLFEENPINASGVDAKAILSARLSKSRRLENLIAQLPGEKKNGLFGNLIALSLGLTPNFKSNFDLAEDAKLQLSKDTYDDDLDNLLAQIGDQYADLFLAAKNLSDAILLSDILRVNTEITKAPLSASMIKRYDEHHQDLTLLKALVRQQLPEKYKEIFFDQSKNGYAGYIDGGASQEEFYKFIKPILEKMDGTEELLVKLNREDLLRKQRTFDNGSIPHQIHLGELHAILRRQEDFYPFLKDNREKIEKILTFRIPYYVGPLARGNSRFAWMTRKSEETITPWNFEEVVDKGASAQSFIERMTNFDKNLPNEKVLPKHSLLYEYFTVYNELTKVKYVTEGMRKPAFLSGEQKKAIVDLLFKTNRKVTVKQLKEDYFKKIECFDSVEISGVEDRFNASLGTYHDLLKIIKDKDFLDNEENEDILEDIVLTLTLFEDREMIEERLKTYAHLFDDKVMKQLKRRRYTGWGRLSRKLINGIRDKQSGKTILDFLKSDGFANRNFMQLIHDDSLTFKEDIQKAQVSGQGDSLHEHIANLAGSPAIKKGILQTVKVVDELVKVMGRHKPENIVIEMARENQTTQKGQKNSRERMKRIEEGIKELGSQILKEHPVENTQLQNEKLYLYYLQNGRDMYVDQELDINRLSDYDVDAIVPQSFLKDDSIDNKVLTRSDKNRGKSDNVPSEEVVKKMKNYWRQLLNAKLITQRKFDNLTKAERGGLSELDKAGFIKRQLVETRQITKHVAQILDSRMNTKYDENDKLIREVKVITLKSKLVSDFRKDFQFYKVREINNYHHAHDAYLNAVVGTALIKKYPKLESEFVYGDYKVYDVRKMIAKSEQEIGKATAKYFFYSNIMNFFKTEITLANGEIRKRPLIETNGETGEIVWDKGRDFATVRKVLSMPQVNIVKKTEVQTGGFSKESILPKRNSDKLIARKKDWDPKKYGGFDSPTVAYSVLVVAKVEKGKSKKLKSVKELLGITIMERSSFEKNPIDFLEAKGYKEVKKDLIIKLPKYSLFELENGRKRMLASAGELQKGNELALPSKYVNFLYLASHYEKLKGSPEDNEQKQLFVEQHKHYLDEIIEQISEFSKRVILADANLDKVLSAYNKHRDKPIREQAENIIHLFTLTNLGAPAAFKYFDTTIDRKRYTSTKEVLDATLIHQSITGLYETRIDLSQLGGD

SEQ ID NO: 3 - protein, 1052 aa, Artificial Sequence
  chemically synthesized
KRNYILGLDIGITSVGYGIIDYETRDVIDAGVRLFKEANVENNEGRRSKRGARRLKRRRRHRIQRVKKLLFDYNLLTDHSELSGINPYEARVKGLSQKLSEEEFSAALLHLAKRRGVHNVNEVEEDTGNELSTKEQISRNSKALEEKYVAELQLERLKKDGEVRGSINRFKTSDYVKEAKQLLKVQKAYHQLDQSFIDTYIDLLETRRTYYEGPGEGSPFGWKDIKEWYEMLMGHCTYFPEELRSVKYAYNADLYNALNDLNNLVITRDENEKLEYYEKFQIIENVFKQKKKPTLKQIAKEILVNEEDIKGYRVTSTGKPEFTNLKVYHDIKDITARKEIIENAELLDQIAKILTIYQSSEDIQEELTNLNSELTQEEIEQISNLKGYTGTHNLSLKAINLILDELWHTNDNQIAIFNRLKLVPKKVDLSQQKEIPTTLVDDFILSPVVKRSFIQSIKVINAIIKKYGLPNDIIIELAREKNSKDAQKMINEMQKRNRQTNERIEEIIRTTGKENAKYLIEKIKLHDMQEGKCLYSLEAIPLEDLLNNPFNYEVDHIIPRSVSFDNSFNNKVLVKQEENSKKGNRTPFQYLSSSDSKISYETFKKHILNLAKGKGRISKTKKEYLLEERDINRFSVQKDFINRNLVDTRYATRGLMNLLRSYFRVNNLDVKVKSINGGFTSFLRRKWKFKKERNKGYKHHAEDALIIANADFIFKEWKKLDKAKKVMENQMFEEKQAESMPEIETEQEYKEIFITPHQIKHIKDFKDYKYSHRVDKKPNRELINDTLYSTRKDDKGNTLIVNNLNGLYDKDNDKLKKLINKSPEKLLMYHHDPQTYQKLKLIMEQYGDEKNPLYKYYEETGNYLTKYSKKDNGPVIKKIKYYGNKLNAHLDITDDYPNSRNKVVKLSLKPYRFDVYLDNGVYKFVTVKNLDVIKKENYYEVNSKCYEEAKKLKKISNQAEFIASFYNNDLIKINGELYRVIGVNNDLLNRIEVNMIDITYREYLENMNDKRPPRIIKTIASKTQSIKKYSTDILGNLYEVKSKKHPQIIKKG

SEQ ID NO: 4 - protein, 1052 aa, Artificial Sequence
  chemically synthesized
KRNYILGLAIGITSVGYGIIDYETRDVIDAGVRLFKEANVENNEGRRSKRGARRLKRRRRHRIQRVKKLLFDYNLLTDHSELSGINPYEARVKGLSQKLSEEEFSAALLHLAKRRGVHNVNEVEEDTGNELSTKEQISRNSKALEEKYVAELQLERLKKDGEVRGSINRFKTSDYVKEAKQLLKVQKAYHQLDQSFIDTYIDLLETRRTYYEGPGEGSPFGWKDIKEWYEMLMGHCTYFPEELRSVKYAYNADLYNALNDLNNLVITRDENEKLEYYEKFQIIENVFKQKKKPTLKQIAKEILVNEEDIKGYRVTSTGKPEFTNLKVYHDIKDITARKEIIENAELLDQIAKILTIYQSSEDIQEELTNLNSELTQEEIEQISNLKGYTGTHNLSLKAINLILDELWHTNDNQIAIFNRLKLVPKKVDLSQQKEIPTTLVDDFILSPVVKRSFIQSIKVINAIIKKYGLPNDIIIELAREKNSKDAQKMINEMQKRNRQTNERIEEIIRTTGKENAKYLIEKIKLHDMQEGKCLYSLEAIPLEDLLNNPFNYEVDHIIPRSVSFDNSFNNKVLVKQEEASKKGNRTPFQYLSSSDSKISYETFKKHILNLAKGKGRISKTKKEYLLEERDINRFSVQKDFINRNLVDTRYATRGLMNLLRSYFRVNNLDVKVKSINGGFTSFLRRKWKFKKERNKGYKHHAEDALIIANADFIFKEWKKLDKAKKVMENQMFEEKQAESMPEIETEQEYKEIFITPHQIKHIKDFKDYKYSHRVDKKPNRELINDTLYSTRKDDKGNTLIVNNLNGLYDKDNDKLKKLINKSPEKLLMYHHDPQTYQKLKLIMEQYGDEKNPLYKYYEETGNYLTKYSKKDNGPVIKKIKYYGNKLNAHLDITDDYPNSRNKVVKLSLKPYRFDVYLDNGVYKFVTVKNLDVIKKENYYEVNSKCYEEAKKLKKISNQAEFIASFYNNDLIKINGELYRVIGVNNDLLNRIEVNMIDITYREYLENMNDKRPPRIIKTIASKTQSIKKYSTDILGNLYEVKSKKHPQIIKKG

SEQ ID NO: 5 - protein, 1227 aa, Artificial Sequence
  chemically synthesized
SKLEKFTNCYSLSKTLRFKAIPVGKTQENIDNKRLLVEDEKRAEDYKGVKKLLDRYYLSFINDVLHSIKLKNLNNYISLFRKKTRTEKENKELENLEINLRKEIAKAFKGNEGYKSLFKKDIIETILPEFLDDKDEIALVNSFNGFTTAFTGFFDNRENMFSEEAKSTSIAFRCINENLTRYISNMDIFEKVDAIFDKHEVQEIKEKILNSDYDVEDFFEGEFFNFVLTQEGIDVYNAIIGGFVTESGEKIKGLNEYINLYNQKTKQKLPKFKPLYKQVLSDRESLSFYGEGYTSDEEVLEVFRNTLNKNSEIFSSIKKLEKLFKNFDEYSSAGIFVKNGPAISTISKDIFGEWNVIRDKWNAEYDDIHLKKKAVVTEKYEDDRRKSFKKIGSFSLEQLQEYADADLSVVEKLKEIIIQKVDEIYKVYGSSEKLFDADFVLEKSLKKNDAVVAIMKDLLDSVKSFENYIKAFFGEGKETNRDESFYGDFVLAYDILLKVDHIYDAIRNYVTQKPYSKDKFKLYFQNPQFMGGWDKDKETDYRATILRYGSKYYLAIMDKKYAKCLQKIDKDDVNGNYEKINYKLLPGPNKMLPKVFFSKKWMAYYNPSEDIQKIYKNGTFKKGDMFNLNDCHKLIDFFKDSISRYPKWSNAYDFNFSETEKYKDIAGFYREVEEQGYKVSFESASKKEVDKLVEEGKLYMFQIYNKDFSDKSHGTPNLHTMYFKLLFDENNHGQIRLSGGAELFMRRASLKKEELVVHPANSPIANKNPDNPKKTTTLSYDVYKDKRFSEDQYELHIPIAINKCPKNIFKINTEVRVLLKHDDNPYVIGIDRGERNLLYIVVVDGKGNIVEQYSLNEIINNFNGIRIKTDYHSLLDKKEKERFEARQNWTSIENIKELKAGYISQVVHKICELVEKYDAVIALEDLNSGFKNSRVKVEKQVYQKFEKMLIDKLNYMVDKKSNPCATGGALKGYQITNKFESFKSMSTQNGFIFYIPAWLTSKIDPSTGFVNLLKTKYTSIADSKKFISSFDRIMYVPEEDLFEFALDYKNFSRTDADYIKKWKLYSYGNRIRIFRNPKKNNVFDWEEVCLTSAYKELFNKYGINYQQGDIRALLCEQSDKAFYSSFMALMSLMLQMRNSITGRTDVDFLISPVKNSDGIFYDSRNYEAQENAILPKNADANGAYNIARKVLWAIGQFKKAEDEKLDKVKIAISNKEWLEYAQTSVKH

SEQ ID NO: 6 - protein, 1227 aa, Artificial Sequence
  chemically synthesized
SKLEKFTNCYSLSKTLRFKAIPVGKTQENIDNKRLLVEDEKRAEDYKGVKKLLDRYYLSFINDVLHSIKLKNLNNYISLFRKKTRTEKENKELENLEINLRKEIAKAFKGNEGYKSLFKKDIIETILPEFLDDKDEIALVNSFNGFTTAFTGFFDNRENMFSEEAKSTSIAFRCINENLTRYISNMDIFEKVDAIFDKHEVQEIKEKILNSDYDVEDFFEGEFFNFVLTQEGIDVYNAIIGGFVTESGEKIKGLNEYINLYNQKTKQKLPKFKPLYKQVLSDRESLSFYGEGYTSDEEVLEVFRNTLNKNSEIFSSIKKLEKLFKNFDEYSSAGIFVKNGPAISTISKDIFGEWNVIRDKWNAEYDDIHLKKKAVVTEKYEDDRRKSFKKIGSFSLEQLQEYADADLSVVEKLKEIIIQKVDEIYKVYGSSEKLFDADFVLEKSLKKNDAVVAIMKDLLDSVKSFENYIKAFFGEGKETNRDESFYGDFVLAYDILLKVDHIYDAIRNYVTQKPYSKDKFKLYFQNPQFMGGWDKDKETDYRATILRYGSKYYLAIMDKKYAKCLQKIDKDDVNGNYEKINYKLLPGPNKMLPKVFFSKKWMAYYNPSEDIQKIYKNGTFKKGDMFNLNDCHKLIDFFKDSISRYPKWSNAYDFNFSETEKYKDIAGFYREVEEQGYKVSFESASKKEVDKLVEEGKLYMFQIYNKDFSDKSHGTPNLHTMYFKLLFDENNHGQIRLSGGAELFMRRASLKKEELVVHPANSPIANKNPDNPKKTTTLSYDVYKDKRFSEDQYELHIPIAINKCPKNIFKINTEVRVLLKHDDNPYVIGIARGERNLLYIVVVDGKGNIVEQYSLNEIINNFNGIRIKTDYHSLLDKKEKERFEARQNWTSIENIKELKAGYISQVVHKICELVEKYDAVIALEDLNSGFKNSRVKVEKQVYQKFEKMLIDKLNYMVDKKSNPCATGGALKGYQITNKFESFKSMSTQNGFIFYIPAWLTSKIDPSTGFVNLLKTKYTSIADSKKFISSFDRIMYVPEEDLFEFALDYKNFSRTDADYIKKWKLYSYGNRIRIFRNPKKNNVFDWEEVCLTSAYKELFNKYGINYQQGDIRALLCEQSDKAFYSSFMALMSLMLQMRNSITGRTDVDFLISPVKNSDGIFYDSRNYEAQENAILPKNADANGAYNIARKVLWAIGQFKKAEDEKLDKVKIAISNKEWLEYAQTSVKH

SEQ ID NO: 7 - protein, 528 aa, Artificial Sequence
  chemically synthesized
AKNTITKTLKLRIVRPYNSAEVEKIVADEKNNREKIALEKNKDKVKEACSKHLKVAAYCTTQVERNACLFCKARKLDDKFYQKLRGQFPDAVFWQEISEIFRQLQKQAAEIYNQSLIELYYEIFIKGKGIANASSVEHYLSDVCYTRAAELFKNAAIASGLRSKIKSNFRLKELKNMKSGLPTTKSDNFPIPLVKQKGGQYTGFEISNHNSDFIIKIPFGRWQVKKEIDKYRPWEKFDFEQVQKSPKPISLLLSTQRRKRNKGWSKDEGTEAEIKKVMNGDYQTSYIEVKRGSKICEKSAWMLNLSIDVPKIDKGVDPSIIGGIDVGVKSPLVCAINNAFSRYSISDNDLFHFNKKMFARRRILLKKNRHKRAGHGAKNKLKPITILTEKSERFRKKLIERWACEIADFFIKNKVGTVQMENLESMKRKEDSYFNIRLRGFWPYAEMQNKIEFKLKQYGIEIRKVAPNNTSKTCSKCGHLNNYFNFEYRKKNKFPHFKCEKCNFKENADYNAALNISNPKLKSTKEEP

SEQ ID NO: 8 - protein, 528 aa, Artificial Sequence
  chemically synthesized
AKNTITKTLKLRIVRPYNSAEVEKIVADEKNNREKIALEKNKDKVKEACSKHLKVAAYCTTQVERNACLFCKARKLDDKFYQKLRGQFPDAVFWQEISEIFRQLQKQAAEIYNQSLIELYYEIFIKGKGIANASSVEHYLSDVCYTRAAELFKNAAIASGLRSKIKSNFRLKELKNMKSGLPTTKSDNFPIPLVKQKGGQYTGFEISNHNSDFIIKIPFGRWQVKKEIDKYRPWEKFDFEQVQKSPKPISLLLSTQRRKRNKGWSKDEGTEAEIKKVMNGDYQTSYIEVKRGSKICEKSAWMLNLSIDVPKIDKGVDPSIIGGIAVGVKSPLVCAINNAFSRYSISDNDLFHFNKKMFARRRILLKKNRHKRAGHGAKNKLKPITILTEKSERFRKKLIERWACEIADFFIKNKVGTVQMENLESMKRKEDSYFNIRLRGFWPYAEMQNKIEFKLKQYGIEIRKVAPNNTSKTCSKCGHLNNYFNFEYRKKNKFPHFKCEKCNFKENAAYNAALNISNPKLKSTKEEP

SEQ ID NO: 9 - protein, 288 aa, Artificial Sequence
  chemically synthesized
FLDGIDKAQDEHEKYHSNWRAMASDFNLPPVVAKEIVASCDKCQLKGEAMHGQVDCSPGIWQLDCTHLEGKVILVAVHVASGYIEAEVIPAETGQETAYFLLKLAGRWPVKTIHTDNGSNFTGATVRAACWWAGIKQEFGIPYNPQSQGVVESMNKELKKIIGQVRDQAEHLKTAVQMAVFIHNFKRKGGIGGYSAGERIVDIIATDIQTKELQKQITKIQNFRVYYRDSRNPLWKGPAKLLWKGEGAVVIQDNSDIKVVPRRKAKIIRDYGKQMAGDDCVASRQDED

SEQ ID NO: 10 - protein, 222 aa, Artificial Sequence
  chemically synthesized
FLDGIDKAQDEHEKYHSNWRAMASDFNLPPVVAKEIVASCDKCQLKGEAMHGQVDCSPGIWQLDCTHLEGKVILVAVHVASGYIEAEVIPAETGQETAYFLLKLAGRWPVKTIHTDNGSNFTGATVRAACWWAGIKQEFGIPYNPQSQGVVESMNKELKKIIGQVRDQAEHLKTAVQMAVFIHNFKRKGGIGGYSAGERIVDIIATDIQTKELQKQITKIQN

SEQ ID NO: 11 - protein, 459 aa, Artificial Sequence
  chemically synthesized
FLDGIDKAQDEHEKYHSNWRAMASDFNLPPVVAKEIVASCDKCQLKGEAMHGQVDCSPGIWQLDCTHLEGKVILVAVHVASGYIEAEVIPAETGQETAYFLLKLAGRWPVKTIHTDNGSNFTGATVRAACWWAGIKQEFGIPYNPQSQGVVESMNKELKKIIGQVRDQAEHLKTAVQMAVFIHNFKRKGGIGGYSAGERIVDIIATDIQTKELQKQITKIQNGGGGSGGGGSGGGGSFLDGIDKAQDEHEKYHSNWRAMASDFNLPPVVAKEIVASCDKCQLKGEAMHGQVDCSPGIWQLDCTHLEGKVILVAVHVASGYIEAEVIPAETGQETAYFLLKLAGRWPVKTIHTDNGSNFTGATVRAACWWAGIKQEFGIPYNPQSQGVVESMNKELKKIIGQVRDQAEHLKTAVQMAVFIHNFKRKGGIGGYSAGERIVDIIATDIQTKELQKQITKIQN

SEQ ID NO: 12 - protein, 288 aa, Artificial Sequence
  chemically synthesized
FLDGIDKAQDEHEKYHSNWRAMASDFNLPPVVAKEIVASCDKCQLKGEAMHGQVDCSPGIWQLDCTHLEGKVILVAVHVASGYIGAEVIPAETGQETAYFLLKLAGRWPVKTIHTDNGSNFTGATVRAACWWAGIKQEFGIPYNPQSQGVVESMNKELKKIIGQVRDQAEHLKTAVQMAVFIHNFKRKGGIGGYSAGERIVDIIATDIQTKELQKQITKIQNFRVYYRDSRNPLWKGPAKLLWKGEGAVVIQDNSDIKVVPRRKAKIIRDYGKQMAGDDCVASRQDED

SEQ ID NO: 13 - protein, 222 aa, Artificial Sequence
  chemically synthesized
FLDGIDKAQDEHEKYHSNWRAMASDFNLPPVVAKEIVASCDKCQLKGEAMHGQVDCSPGIWQLDCTHLEGKVILVAVHVASGYIGAEVIPAETGQETAYFLLKLAGRWPVKTIHTDNGSNFTGATVRAACWWAGIKQEFGIPYNPQSQGVVESMNKELKKIIGQVRDQAEHLKTAVQMAVFIHNFKRKGGIGGYSAGERIVDIIATDIQTKELQKQITKIQN

SEQ ID NO: 14 - protein, 288 aa, Artificial Sequence
  chemically synthesized
FLDGIDKAQDEHEKYHSNWRAMASDFNLPPVVAKEIVASCDKCQLKGEAMHGQVDCSPGIWQLDCTHLEGKVILVAVHVASGYIFAEVIPAETGQETAYFLLKLAGRWPVKTIHTDNGSNFTGATVRAACWWAGIKQEFGIPYNPQSQGVVESMNKELKKIIGQVRDQAEHLKTAVQMAVFIHNFKRKGGIGGYSAGERIVDIIATDIQTKELQKQITKIQNFRVYYRDSRNPLWKGPAKLLWKGEGAVVIQDNSDIKVVPRRKAKIIRDYGKQMAGDDCVASRQDED

SEQ ID NO: 15 - protein, 221 aa, Artificial Sequence
  chemically synthesized
FLDGIDKAQDEHEKYHSNWRAMASDFNLPPVVAKEIVASCDKCQLKGEAMHGQVDCSPGIWQLDCTHLEGKVILVAVHVASGYIFAEVIPAETGQETAYFLLKLAGRWPVKTIHTDNGSNFTGATVRAACWWAGIKQEFGIPYNPQSQGVVESMNKELKKIIGQVRDQAEHLKTAVQMAVFIHNFKRKGGIGGYSAGERIVDIIATDIQTKELQKQTKIQN

SEQ ID NO: 16 - protein, 288 aa, Artificial Sequence
  chemically synthesized
FLDGIDKAQDEHEKYHSNWRAMASDFNLPPVVAKEIVASCDKCQLKGEAMHGQVDCSPGIWQLDCTHLEGKVILVAVHVASGYIEAEVIPAETGQETAYFLLKLAGRWPVKTIHTNNGSNFTGATVRAACWWAGIKQEFGIPYNPQSQGVVESMNKELKKIIGQVRDQAEHLKTAVQMAVFIHNFKRKGGIGGYSAGERIVDIIATDIQTKELQKQITKIQNFRVYYRDSRNPLWKGPAKLLWKGEGAVVIQDNSDIKVVPRRKAKIIRDYGKQMAGDDCVASRQDED

SEQ ID NO: 17 - protein, 222 aa, Artificial Sequence
  chemically synthesized
FLDGIDKAQDEHEKYHSNWRAMASDFNLPPVVAKEIVASCDKCQLKGEAMHGQVDCSPGIWQLDCTHLEGKVILVAVHVASGYIEAEVIPAETGQETAYFLLKLAGRWPVKTIHTNNGSNFTGATVRAACWWAGIKQEFGIPYNPQSQGVVESMNKELKKIIGQVRDQAEHLKTAVQMAVFIHNFKRKGGIGGYSAGERIVDIIATDIQTKELQKQITKIQN

SEQ ID NO: 18 - protein, 288 aa, Artificial Sequence
  chemically synthesized
FLDGIDKAQDEHEKYHSNWRAMASDFNLPPVVAKEIVASCDKCQLKGEAMHGQVDCSPGIWQLDCTHLEGKVILVAVHVASGYIEAEVIPAETGQETAYFLLKLAGRWPVKTIHTDNGSNFTGATVRAACWWAGIKQEFGIPYNPQSQGVVESMNKELKKIIGQVRDQAEHLKTAVQMAVFIHNKKRKGGIGGYSAGERIVDIIATDIQTKELQKQITKIQNFRVYYRDSRNPLWKGPAKLLWKGEGAVVIQDNSDIKVVPRRKAKIIRDYGKQMAGDDSVASRQDED

SEQ ID NO: 19 - protein, 288 aa, Artificial Sequence
  chemically synthesized
FLDGIDKAQDEHEKYHSNWRAMASDFNLPPVVAKEIVASCDKCQLKGEAMHGQVDCSPGIWQLDCTHLEGKVILVAVHVASGYIEAEVIPAETGQETAYFLLKLAGRWPVKTIHTDNGSNFTGATVRAACWWAGIKQEFGIPYNPQSQGVVESMNKELKKIIGQVRDQAEHLKTAVQMAVFIHNFKRKGGIGGYSAGERIVDIIATDIQTKELQKQITKIQNFRVYYRDSRNPLWKGPAKLLWKGEGAVVIQDNSDIKVVPRRKAKIIRDYGKQMAGDDSVASRQDED

SEQ ID NO: 20 - protein, 288 aa, Artificial Sequence
  chemically synthesized
FLDGIDKAQDEHEKYHSNWRAMASDFNLPPVVAKEIVASCDKCQLKGEAMHGQVDCSPGIWQLDCTHLEGKVILVAVHVASGYIEAEVIPAETGQETAYFLLKLAGRWPVKTIHTDNGSNFTGATVRAACWWAGIKQEFGIPYNPQSQGVVESMNKELKKIIGQVRDQAEHLKTAVQMAVFIHNKKRKGGIGGYSAGERIVDIIATDIQTKELQKQITKIQNFRVYYRDSRNPLWKGPAKLLWKGEGAVVIQDNSDIKVVPRRKAKIIRDYGKQMAGDDCVASRQDED

SEQ ID NO: 21 - protein, 222 aa, Artificial Sequence
  chemically synthesized
FLDGIDKAQDEHEKYHSNWRAMASDFNLPPVVAKEIVASCDKCQLKGEAMHGQVDCSPGIWQLDCTHLEGKVILVAVHVASGYIEAEVIPAETGQETAYFLLKLAGRWPVKTIHTDNGSNFTGATVRAACWWAGIKQEFGIPYNPQSQGVVESMNKELKKIIGQVRDQAEHLKTAVQMAVFIHNKKRKGGIGGYSAGERIVDIIATDIQTKELQKQITKIQN

SEQ ID NO: 22 - protein, 288 aa, Artificial Sequence
  chemically synthesized
FLDGIDKAQDEHEKYHSNWRAMASDFNLPPVVAKEIVASCDKCQLKGEAMHGQVDCSPGIWQLDCTHLEGKVILVAVHVASGYIEAEVIPAETGQEAAYFLLKLAGRWPVKTIHTDNGSNFTGATVRAACWWAGIKQEFGIPRNPQSQGVVESMNKELKKIIGQVRDQAEHLKTAVQMAVFIHNFKRKGGIGGYSAGERIVDIIATDIQTKELQKQITKIQNFRVYYRDSRNPLWKGPAKLLWKGEGAVVIQDNSDIKVVPRRKAKIIRDYGKQMAGDDCVASRQDED

SEQ ID NO: 23 - protein, 222 aa, Artificial Sequence
  chemically synthesized
FLDGIDKAQDEHEKYHSNWRAMASDFNLPPVVAKEIVASCDKCQLKGEAMHGQVDCSPGIWQLDCTHLEGKVILVAVHVASGYIEAEVIPAETGQEAAYFLLKLAGRWPVKTIHTDNGSNFTGATVRAACWWAGIKQEFGIPRNPQSQGVVESMNKELKKIIGQVRDQAEHLKTAVQMAVFIHNFKRKGGIGGYSAGERIVDIIATDIQTKELQKQITKIQN

SEQ ID NO: 24 - protein, 288 aa, Artificial Sequence
  chemically synthesized
FLDGIDKAQDEHEKYHSNWRAMASDFNLPPVVAKEIVASCDKCQLKGEAMHGQVDCSPGIWQLDCTHLEGKVILVAVHVASGYIEAEVIPAETGQETAYFLLKLAGRWPVKTIHTDNGSNFTGATVRAACWWAGIKQEFSIPYNPQSHGVVESMNKELKKIIGQVRDQAEHLKTAVQMAVFIHNFKRKGGIGGYSAGERIVDIIATDIQTKELQKQITKIQNFRVYYRDSRNPLWKGPAKLLWKGEGAVVIQDNSDIKVVPRRKAKIIRDYGKQMAGDDCVASRQDED

SEQ ID NO: 25 - protein, 222 aa, Artificial Sequence
  chemically synthesized
FLDGIDKAQDEHEKYHSNWRAMASDFNLPPVVAKEIVASCDKCQLKGEAMHGQVDCSPGIWQLDCTHLEGKVILVAVHVASGYIEAEVIPAETGQETAYFLLKLAGRWPVKTIHTDNGSNFTGATVRAACWWAGIKQEFSIPYNPQSHGVVESMNKELKKIIGQVRDQAEHLKTAVQMAVFIHNFKRKGGIGGYSAGERIVDIIATDIQTKELQKQITKIQN

SEQ ID NO: 26 - protein, 323 aa, Artificial Sequence
  chemically synthesized
PLREAKDLHTALHIGPRALSKACNISMQQAREVVQTCPHCNSAPALEAGVNPRGLGPLQIWQTDFTLEPRMAPRSWLAVTVDTASSAIVVTQHGRVTSVAVQHHWATAIAVLGRPKAIKTDNGSCFTSKSTREWLARWGIAHTTGIPGNSQGQAMVERANRLLKDRIRVLAEGDGFMKRIPTSKQGELLAKAMYALNHFERGENTKTPIQKHWRPTVLTEGPPVKIRIETGEWEKGWNVLVWGRGYAAVKNRDTDKVIWVPSRKVKPDITQKDEVTKKDEASPLFAGISDWIPWEDEQEGLQGETASNKQERPGEDTLAANES

SEQ ID NO: 27 - protein, 221 aa, Artificial Sequence
  chemically synthesized
PLREAKDLHTALHIGPRALSKACNISMQQAREVVQTCPHCNSAPALEAGVNPRGLGPLQIWQTDFTLEPRMAPRSWLAVTVDTASSAIVVTQHGRVTSVAVQHHWATAIAVLGRPKAIKTDNGSCFTSKSTREWLARWGIAHTTGIPGNSQGQAMVERANRLLKDRIRVLAEGDGFMKRIPTSKQGELLAKAMYALNHFERGENTKTPIQKHWRPTVLTEG

SEQ ID NO: 28 - protein, 392 aa, Artificial Sequence
  chemically synthesized
CNTKKPNLDAELDQLLQGHYIKGYPKQYTYFLEDGKVKVSRPEGVKIIPPQSDRQKIVLQAHNLAHTGREATLLKIANLYWWPNMRKDVVKQLGRCQQCLITNASNKASGPILRPDRPQKPFDKFFIDYIGPLPPSQGYLYVLVVVDGMTGFTWLYPTKAPSTSATVKSLNVLTSIAIPKVIHSDQGAAFTSSTFAEWAKERGIHLEFSTPYHPQSGSKVERKNSDIKRLLTKLLVGRPTKWYDLLPVVQLALNNTYSPVLKYTPHQLLFGIDSNTPFANQDTLDLTREEELSLLQEIRTSLYHPSTPPASSRSWSPVVGQLVQERVARPASLRPRWHKPSTVLKVLNPRTVVILDHLGNNRTVSIDNLKPTSHQNGTTNDTATMDHLEKNE

SEQ ID NO: 29 - protein, 316 aa, Artificial Sequence
  chemically synthesized
CNTKKPNLDAELDQLLQGHYIKGYPKQYTYFLEDGKVKVSRPEGVKIIPPQSDRQKIVLQAHNLAHTGREATLLKIANLYWWPNMRKDVVKQLGRCQQCLITNASNKASGPILRPDRPQKPFDKFFIDYIGPLPPSQGYLYVLVVVDGMTGFTWLYPTKAPSTSATVKSLNVLTSIAIPKVIHSDQGAAFTSSTFAEWAKERGIHLEFSTPYHPQSGSKVERKNSDIKRLLTKLLVGRPTKWYDLLPVVQLALNNTYSPVLKYTPHQLLFGIDSNTPFANQDTLDLTREEELSLLQEIRTSLYHPSTPPASSRSWS

SEQ ID NO: 30 - protein, 277 aa, Artificial Sequence
  chemically synthesized
GSTGVFWVENIQEAQDEHENWHTSPKILARNYKIPLTVAKQITQECPHCTKQGSGPAGCVMRSPNHWQADCTHLDNKIILTFVESNSGYIHATLLSKENALCTSLAILEWARLFSPKSLHTDNGTNFVAEPVVNLLKFLKIAHTTGIPYHPESQGIVERANRTLKEKIQSHRDNTQTLEAALQLALITCNKGRESMGGQTPWEVFITNQAQVIHEKLLLQQAQSSKKFCFYKIPGEHDWKGPTRVLWKGDGAVVVNDEGKGIIAVPLTRTKLLIKPN

SEQ ID NO: 31 - protein, 225 aa, Artificial Sequence
  chemically synthesized
GSTGVFWVENIQEAQDEHENWHTSPKILARNYKIPLTVAKQITQECPHCTKQGSGPAGCVMRSPNHWQADCTHLDNKIILTFVESNSGYIHATLLSKENALCTSLAILEWARLFSPKSLHTDNGTNFVAEPVVNLLKFLKIAHTTGIPYHPESQGIVERANRTLKEKIQSHRDNTQTLEAALQLALITCNKGRESMGGQTPWEVFITNQAQVIHEKLLLQQAQSS

SEQ ID NO: 32 - protein, 408 aa, Artificial Sequence
  chemically synthesized
IENSSPYTSEHFHYTVTDIKDLTKLGAIYDKTKKYWVYQGKPVMPDQFTFELLDFLHQLTHLSFSKMKALLERSHSPYYMLNRDRTLKNITETCKACAQVNASKSAVKQGTRVRGHRPGTHWEIDFTEIKPGLYGYKYLLVFIDTFSGWIEAFPTKKETAKVVTKKLLEEIFPRFGMPQVLGTDNGPAFVSKVSQTVADLLGIDWKLHCAYRPQSSGQVERMNRTIKETLTKLTLATGSRDWVLLLPLALYRARNTPGPHGLTPYEILYGAPPPLVNFPDPDMTRVTNSPSLQAHLQALYLVQHEVWRPLAAAYQEQLDRPVVPHPYRVGDTVWVRRHQTKNLEPRWKGPYTVLLTTPTALKVDGIAAWIHAAHVKAADPGGGPSSRLTWRVQRSQNPLKIRLTREAP

SEQ ID NO: 33 - protein, 326 aa, Artificial Sequence
  chemically synthesized
IENSSPYTSEHFHYTVTDIKDLTKLGAIYDKTKKYWVYQGKPVMPDQFTFELLDFLHQLTHLSFSKMKALLERSHSPYYMLNRDRTLKNITETCKACAQVNASKSAVKQGTRVRGHRPGTHWEIDFTEIKPGLYGYKYLLVFIDTFSGWIEAFPTKKETAKVVTKKLLEEIFPRFGMPQVLGTDNGPAFVSKVSQTVADLLGIDWKLHCAYRPQSSGQVERMNRTIKETLTKLTLATGSRDWVLLLPLALYRARNTPGPHGLTPYEILYGAPPPLVNFPDPDMTRVTNSPSLQAHLQALYLVQHEVWRPLAAAYQEQLDRPVVPHP

SEQ ID NO: 34 - protein, 318 aa, Artificial Sequence
  chemically synthesized
LESAQESHALHHQNAAALRFQFHITREQAREIVKLCPNCPDWGHAPQLGVNPRGLKPRVLWQMDVTHVSEFGKLKYVHVTVDTYSHFTFATARTGEATKDVLQHLAQSFAYMGIPQKIKTDNAPAYVSRSIQEFLARWKISHVTGIPYNPQGQAIVERTHQNIKAQLNKLQKAGKYYTPHHLLAHALFVLNHVNMDNQGHTAAERHWGPISADPKPMVMWKDLLTGSWKGPDVLITAGRGYACVFPQDAETPIWVPDRFIRPFTERKEATPTPGTAEKTPPRDEKDQQESPKNESSPHQREDGLATSAGVDLRSGGGP

SEQ ID NO: 35 - protein, 212 aa, Artificial Sequence
  chemically synthesized
LESAQESHALHHQNAAALRFQFHITREQAREIVKLCPNCPDWGHAPQLGVNPRGLKPRVLWQMDVTHVSEFGKLKYVHVTVDTYSHFTFATARTGEATKDVLQHLAQSFAYMGIPQKIKTDNAPAYVSRSIQEFLARWKISHVTGIPYNPQGQAIVERTHQNIKAQLNKLQKAGKYYTPHHLLAHALFVLNHVNMDNQGHTAAERHWGPISA

SEQ ID NO: 36 - protein, 380 aa, Artificial Sequence
  chemically synthesized
VLKKGDALASTDLVMEYSETDEKFTAGAELHDGVFMRGDLIVPPLEMLHAILLAIHGVSHTHKGGIMSYFSKFWTHPKASQTIDLILGHCQICLKHNPKYKSRLQGHRPLPSRPFAHLQIDFVQMCVKKPMYALVIIDVFSKWPEIIPCNKEDAKTVCDILMKDIIPRWGLPDQIDSDQGTHFTAKISQELTHSIGVAWKLHCPGHPRSSGIVERTNRTLKSKIIKAQEQLQLSKWTEVLPYVLLEMRATPKKHGLSPHEIVMGRPMKTTYLSDMSPLWATDTLVTYMNKLTRQLSAYHQQVVDQWPSTSLPPGPEPGSWCMLRNPKKSSNWEGPFLILLSTPTAVKVEGRPTWIHLDHCKLLRSSLSSSLGGPVNQLLS

SEQ ID NO: 37 - protein, 311 aa, Artificial Sequence
  chemically synthesized
VLKKGDALASTDLVMEYSETDEKFTAGAELHDGVFMRGDLIVPPLEMLHAILLAIHGVSHTHKGGIMSYFSKFWTHPKASQTIDLILGHCQICLKHNPKYKSRLQGHRPLPSRPFAHLQIDFVQMCVKKPMYALVIIDVFSKWPEIIPCNKEDAKTVCDILMKDIIPRWGLPDQIDSDQGTHFTAKISQELTHSIGVAWKLHCPGHPRSSGIVERTNRTLKSKIIKAQEQLQLSKWTEVLPYVLLEMRATPKKHGLSPHEIVMGRPMKTTYLSDMSPLWATDTLVTYMNKLTRQLSAYHQQVVDQWPSTSL

SEQ ID NO: 38 - protein, 296 aa, Artificial Sequence
  chemically synthesized
LPLETPEQWHKLTHCNSRALSRWPNPRISAWDPRSPATLCETCQKLNPTGGGKMRTIQRGWAPNHIWQADITHYKYKQFTYALHVFVDTYSGATHASAKRGLTTQMTIEGLLEAIVHLGRPKKLNTDQGANYTSKTFVRFCQQFGVSLSHHVPYNPTSSGLVERTNGLLKLLLSKYHLDEPHLPMTQALSRALWTHNQINLLPILKTRWELHHSPPLAVISEGGETPKGSDKLFLYKLPGQNNRRWLGPLPALVEASGGALLATDPPVWVPWRLLKAFKCLKNDGPEDAHNRSSDG

SEQ ID NO: 39 - protein, 227 aa, Artificial Sequence
  chemically synthesized
LPLETPEQWHKLTHCNSRALSRWPNPRISAWDPRSPATLCETCQKLNPTGGGKMRTIQRGWAPNHIWQADITHYKYKQFTYALHVFVDTYSGATHASAKRGLTTQMTIEGLLEAIVHLGRPKKLNTDQGANYTSKTFVRFCQQFGVSLSHHVPYNPTSSGLVERTNGLLKLLLSKYHLDEPHLPMTQALSRALWTHNQINLLPILKTRWELHHSPPLAVISEGGETP

SEQ ID NO: 40 - protein, 293 aa, Artificial Sequence
  chemically synthesized
FLEKIEPAQEEHDKYHSNVKELVFKFGLPRIVARQIVDTCDKCHQKGEAIHGQANSDLGTWQMDCTHLEGKIIIVAVHVASGFIEAEVIPQETGRQTALFLLKLAGRWPITHLHTDNGANFASQEVKMVAWWAGIEHTFGVPYNPQSQGVVEAMNHHLKNQIDRIREQANSVETIVLMAVHCMNFKRRGGIGDMTPAERLINMITTEQEIQFQQSKNSKFKNFRVYYREGRDQLWKGPGELLWKGEGAVILKVGTDIKVVPRRKAKIIKDYGGGKEVDSSSHMEDTGEAREVA

SEQ ID NO: 41 - protein, 222 aa, Artificial Sequence
  chemically synthesized
FLEKIEPAQEEHDKYHSNVKELVFKFGLPRIVARQIVDTCDKCHQKGEAIHGQANSDLGTWQMDCTHLEGKIIIVAVHVASGFIEAEVIPQETGRQTALFLLKLAGRWPITHLHTDNGANFASQEVKMVAWWAGIEHTFGVPYNPQSQGVVEAMNHHLKNQIDRIREQANSVETIVLMAVHCMNFKRRGGIGDMTPAERLINMITTEQEIQFQQSKNSKFKN

SEQ ID NO: 42 - protein, 281 aa, Artificial Sequence
  chemically synthesized
SSWVDRIEEAEINHEKFHSDPQYLRTEFNLPKMVAEEIRRKCPVCRIRGEQVGGQLKIGPGIWQMDCTHFDGKIILVGIHVESGYIWAQIISQETADCTVKAVLQLLSAHNVTELQTDNGPNFKNQKMEGVLNYMGVKHKFGIPGNPQSQALVENVNHTLKVWIRKFLPETTSLDNALSLAVHSLNFKRRGRIGGMAPYELLAQQESLRIQDYFSAIPQKLQAQWIYYKDQKDKKWKGPMRVEYWGQGSVLLKDEEKGYFLIPRRHIRRVPEPCALPEGDE

SEQ ID NO: 43 - protein, 223 aa, Artificial Sequence
  chemically synthesized
SSWVDRIEEAEINHEKFHSDPQYLRTEFNLPKMVAEEIRRKCPVCRIRGEQVGGQLKIGPGIWQMDCTHFDGKIILVGIHVESGYIWAQIISQETADCTVKAVLQLLSAHNVTELQTDNGPNFKNQKMEGVLNYMGVKHKFGIPGNPQSQALVENVNHTLKVWIRKFLPETTSLDNALSLAVHSLNFKRRGRIGGMAPYELLAQQESLRIQDYFSAIPQKLQA

SEQ ID NO: 44 - protein, 281 aa, Artificial Sequence
  chemically synthesized
TCFLENIPSATEDHERWHTSPDILVRQFHLPKRIAKEIVARCQECKRTTTSPVRGTNPRGRFLWQMDNTHWNKTIIWVAVETNSGLVEAQVIPEETALQVALCILQLIQRYTVLHLHSDNGPCFTAHRIENLCKYLGITKTTGIPYNPQSQGVVERAHRDLKDRLAAYQGDCETVEAALSLALVSLNKKRGGIGGHTPYEIYLESEHTKYQDQLEQQFSKQKIEKWCYVRNRRKEWKGPYKVLWDGDGAAVIEEEGKTALYPHRHMRFIPPPDSDIQDGSS

SEQ ID NO: 45 - protein, 224 aa, Artificial Sequence
  chemically synthesized
TCFLENIPSATEDHERWHTSPDILVRQFHLPKRIAKEIVARCQECKRTTTSPVRGTNPRGRFLWQMDNTHWNKTIIWVAVETNSGLVEAQVIPEETALQVALCILQLIQRYTVLHLHSDNGPCFTAHRIENLCKYLGITKTTGIPYNPQSQGVVERAHRDLKDRLAAYQGDCETVEAALSLALVSLNKKRGGIGGHTPYEIYLESEHTKYQDQLEQQFSKQKIE

SEQ ID NO: 46 - protein, 267 aa, Artificial Sequence
  chemically synthesized
NVHTSESTRKYPYPFIHRMLAHANAQTIRYSLKNNTITYFNESDVDWSSAIDYQCPDCLIGKSTKHRHIKGSRLKYQNSYEPFQYLHTDIFGPVHNLPKSAPSYFISFTDETTKFRWVYPLHDRREDSILDVFTTILAFIKNQFQASVLVIQMDRGSEYTNRTLHKFLEKNGITPCYTTTADSRAHGVAERLNRTLLDDCRTQLQCSGLPNHLWFSAIEFSTIVRNSLASPKSKKSARQHAGLAGLDISTLLPFGQPVIVNDHNPNS

SEQ ID NO: 47 - protein, 287 aa, Artificial Sequence
  chemically synthesized
KYVFIEKHQAEFSIKAMCRVLRVARSGWYTWCQRRTRISTRQQFRQHCDSVVLAAFTRSKQRYGAPRLTDELRAQGYPFNVKTVAASLRRQGLRAKASRKFSPVSYRAHGLPVSENLLEQDFYASGPNQKWAGDITYLRTDEGWLYLAVVIDLWSRAVIGWSMSPRMTAQLACDALQMALWRRKRPRNVIVHTDRGGQYCSADYQAQLKRHNLRGSMSAKGCCYDNACVESFFHSLKVECIHGEHFISREIMRATVFNYIECDYNRWRRHSWCGGLSPEQFENKNLA

SEQ ID NO: 48 - protein, 175 aa, Artificial Sequence
  chemically synthesized
VSENLLEQDFYASGPNQKWAGDITYLRTDEGWLYLAVVIDLWSRAVIGWSMSPRMTAQLACDALQMALWRRKRPRNVIVHTDRGGQYCSADYQAQLKRHNLRGSMSAKGCCYDNACVESFFHSLKVECIHGEHFISREIMRATVFNYIECDYNRWRRHSWCGGLSPEQFENKNLA

SEQ ID NO: 49 - protein, 9 aa, Artificial Sequence
  chemically synthesized
PKKKRKVSS

SEQ ID NO: 50 - protein, 24 aa, Artificial Sequence
  chemically synthesized
DPKKKRKVDPKKKRKVDPKKKRKV

SEQ ID NO: 51 - protein, 22 aa, Artificial Sequence
  chemically synthesized
DYKDHDGDYKDHDIDYKDDDDK

SEQ ID NO: 52 - protein, 16 aa, Artificial Sequence
  chemically synthesized
KRPAATKKAGQAKKKK

SEQ ID NO: 53 - protein, 39 aa, Artificial Sequence
  chemically synthesized
NSKKRSLEDNETEIKVSRDTWNTKNMRSLEPPRSKKRIH

SEQ ID NO: 54 - protein, 39 aa, Artificial Sequence
  chemically synthesized
KSKKRSLEDNETEIEVSRDTWNNKNMRSLEPPRSKKRIN

SEQ ID NO: 55 - protein, 33 aa, Artificial Sequence
  chemically synthesized
NVKKRKRRSKKINKLTDGQIRINHVSSEKKRRE

SEQ ID NO: 56 - protein, 43 aa, Artificial Sequence
  chemically synthesized
TMKKRDAETADIGDQSEVESDTEELKKIMFGEKKKLNKKKRKQ

SEQ ID NO: 57 - protein, 37 aa, Artificial Sequence
  chemically synthesized
RQKKRVYYDDGLTEEQFLEAVEDDNMSLEDAIKKRRE

SEQ ID NO: 58 - protein, 31 aa, Artificial Sequence
  chemically synthesized
PKKKRKVSSDYKDHDGDYKDHDIDYKDDDDK

SEQ ID NO: 59 - protein, 50 aa, Artificial Sequence
  chemically synthesized
GSDPKKKRKVDPKKKRKVDPKKKRKVLEDYKDHDGDYKDHDIDYKDDDDK

SEQ ID NO: 60 - protein, 40 aa, Artificial Sequence
  chemically synthesized
KRPAATKKAGQAKKKKLEDYKDHDGDYKDHDIDYKDDDDK

SEQ ID NO: 61 - protein, 63 aa, Artificial Sequence
  chemically synthesized
NSKKRSLEDNETEIKVSRDTWNTKNMRSLEPPRSKKRIHLEDYKDHDGDYKDHDIDYKDDDDK

SEQ ID NO: 62 - protein, 67 aa, Artificial Sequence
  chemically synthesized
GSKRPAATKKAGQAKKKKVDPKKKRKVDPKKKRKVDPKKKRKVLEDYKDHDGDYKDHDIDYKDDDDK

SEQ ID NO: 63 - protein, 880 aa, Artificial Sequence
  chemically synthesized
MPKKKRKVSSFLDGIDKAQDEHEKYHSNWRAMASDFNLPPVVAKEIVASCDKCQLKGEAMHGQVDCSPGIWQLDCTHLEGKVILVAVHVASGYIEAEVIPAETGQETAYFLLKLAGRWPVKTIHTDNGSNFTGATVRAACWWAGIKQEFGIPYNPQSQGVVESMNKELKKIIGQVRDQAEHLKTAVQMAVFIHNFKRKGGIGGYSAGERIVDIIATDIQTKELQKQITKIQNFRVYYRDSRNPLWKGPAKLLWKGEGAVVIQDNSDIKVVPRRKAKIIRDYGKQMAGDDCVASRQDEDGGGGSGGGGSGGGGSAKNTITKTLKLRIVRPYNSAEVEKIVADEKNNREKIALEKNKDKVKEACSKHLKVAAYCTTQVERNACLFCKARKLDDKFYQKLRGQFPDAVFWQEISEIFRQLQKQAAEIYNQSLIELYYEIFIKGKGIANASSVEHYLSDVCYTRAAELFKNAAIASGLRSKIKSNFRLKELKNMKSGLPTTKSDNFPIPLVKQKGGQYTGFEISNHNSDFIIKIPFGRWQVKKEIDKYRPWEKFDFEQVQKSPKPISLLLSTQRRKRNKGWSKDEGTEAEIKKVMNGDYQTSYIEVKRGSKICEKSAWMLNLSIDVPKIDKGVDPSIIGGIAVGVKSPLVCAINNAFSRYSISDNDLFHFNKKMFARRRILLKKNRHKRAGHGAKNKLKPITILTEKSERFRKKLIERWACEIADFFIKNKVGTVQMENLESMKRKEDSYFNIRLRGFWPYAEMQNKIEFKLKQYGIEIRKVAPNNTSKTCSKCGHLNNYFNFEYRKKNKFPHFKCEKCNFKENAAYNAALNISNPKLKSTKEEPNSKKRSLEDNETEIKVSRDTWNTKNMRSLEPPRSKKRIH

SEQ ID NO: 64 - protein, 814 aa, Artificial Sequence
  chemically synthesized
MPKKKRKVSSFLDGIDKAQDEHEKYHSNWRAMASDFNLPPVVAKEIVASCDKCQLKGEAMHGQVDCSPGIWQLDCTHLEGKVILVAVHVASGYIEAEVIPAETGQETAYFLLKLAGRWPVKTIHTDNGSNFTGATVRAACWWAGIKQEFGIPYNPQSQGVVESMNKELKKIIGQVRDQAEHLKTAVQMAVFIHNFKRKGGIGGYSAGERIVDIIATDIQTKELQKQITKIQNGGGGSGGGGSGGGGSAKNTITKTLKLRIVRPYNSAEVEKIVADEKNNREKIALEKNKDKVKEACSKHLKVAAYCTTQVERNACLFCKARKLDDKFYQKLRGQFPDAVFWQEISEIFRQLQKQAAEIYNQSLIELYYEIFIKGKGIANASSVEHYLSDVCYTRAAELFKNAAIASGLRSKIKSNFRLKELKNMKSGLPTTKSDNFPIPLVKQKGGQYTGFEISNHNSDFIIKIPFGRWQVKKEIDKYRPWEKFDFEQVQKSPKPISLLLSTQRRKRNKGWSKDEGTEAEIKKVMNGDYQTSYIEVKRGSKICEKSAWMLNLSIDVPKIDKGVDPSIIGGIAVGVKSPLVCAINNAFSRYSISDNDLFHFNKKMFARRRILLKKNRHKRAGHGAKNKLKPITILTEKSERFRKKLIERWACEIADFFIKNKVGTVQMENLESMKRKEDSYFNIRLRGFWPYAEMQNKIEFKLKQYGIEIRKVAPNNTSKTCSKCGHLNNYFNFEYRKKNKFPHFKCEKCNFKENAAYNAALNISNPKLKSTKEEPNSKKRSLEDNETEIKVSRDTWNTKNMRSLEPPRSKKRIH

SEQ ID NO: 65 - protein, 1051 aa, Artificial Sequence
  chemically synthesized
MPKKKRKVSSFLDGIDKAQDEHEKYHSNWRAMASDFNLPPVVAKEIVASCDKCQLKGEAMHGQVDCSPGIWQLDCTHLEGKVILVAVHVASGYIEAEVIPAETGQETAYFLLKLAGRWPVKTIHTDNGSNFTGATVRAACWWAGIKQEFGIPYNPQSQGVVESMNKELKKIIGQVRDQAEHLKTAVQMAVFIHNFKRKGGIGGYSAGERIVDIIATDIQTKELQKQITKIQNGGGGSGGGGSGGGGSFLDGIDKAQDEHEKYHSNWRAMASDFNLPPVVAKEIVASCDKCQLKGEAMHGQVDCSPGIWQLDCTHLEGKVILVAVHVASGYIEAEVIPAETGQETAYFLLKLAGRWPVKTIHTDNGSNFTGATVRAACWWAGIKQEFGIPYNPQSQGVVESMNKELKKIIGQVRDQAEHLKTAVQMAVFIHNFKRKGGIGGYSAGERIVDIIATDIQTKELQKQITKIQNGGGGSGGGGSGGGGSAKNTITKTLKLRIVRPYNSAEVEKIVADEKNNREKIALEKNKDKVKEACSKHLKVAAYCTTQVERNACLFCKARKLDDKFYQKLRGQFPDAVFWQEISEIFRQLQKQAAEIYNQSLIELYYEIFIKGKGIANASSVEHYLSDVCYTRAAELFKNAAIASGLRSKIKSNFRLKELKNMKSGLPTTKSDNFPIPLVKQKGGQYTGFEISNHNSDFIIKIPFGRWQVKKEIDKYRPWEKFDFEQVQKSPKPISLLLSTQRRKRNKGWSKDEGTEAEIKKVMNGDYQTSYIEVKRGSKICEKSAWMLNLSIDVPKIDKGVDPSIIGGIAVGVKSPLVCAINNAFSRYSISDNDLFHFNKKMFARRRILLKKNRHKRAGHGAKNKLKPITILTEKSERFRKKLIERWACEIADFFIKNKVGTVQMENLESMKRKEDSYFNIRLRGFWPYAEMQNKIEFKLKQYGIEIRKVAPNNTSKTCSKCGHLNNYFNFEYRKKNKFPHFKCEKCNFKENAAYNAALNISNPKLKSTKEEPNSKKRSLEDNETEIKVSRDTWNTKNMRSLEPPRSKKRIH

SEQ ID NO: 66 - protein, 880 aa, Artificial Sequence
  chemically synthesized
MPKKKRKVSSFLDGIDKAQDEHEKYHSNWRAMASDFNLPPVVAKEIVASCDKCQLKGEAMHGQVDCSPGIWQLDCTHLEGKVILVAVHVASGYIGAEVIPAETGQETAYFLLKLAGRWPVKTIHTDNGSNFTGATVRAACWWAGIKQEFGIPYNPQSQGVVESMNKELKKIIGQVRDQAEHLKTAVQMAVFIHNFKRKGGIGGYSAGERIVDIIATDIQTKELQKQITKIQNFRVYYRDSRNPLWKGPAKLLWKGEGAVVIQDNSDIKVVPRRKAKIIRDYGKQMAGDDCVASRQDEDGGGGSGGGGSGGGGSAKNTITKTLKLRIVRPYNSAEVEKIVADEKNNREKIALEKNKDKVKEACSKHLKVAAYCTTQVERNACLFCKARKLDDKFYQKLRGQFPDAVFWQEISEIFRQLQKQAAEIYNQSLIELYYEIFIKGKGIANASSVEHYLSDVCYTRAAELFKNAAIASGLRSKIKSNFRLKELKNMKSGLPTTKSDNFPIPLVKQKGGQYTGFEISNHNSDFIIKIPFGRWQVKKEIDKYRPWEKFDFEQVQKSPKPISLLLSTQRRKRNKGWSKDEGTEAEIKKVMNGDYQTSYIEVKRGSKICEKSAWMLNLSIDVPKIDKGVDPSIIGGIAVGVKSPLVCAINNAFSRYSISDNDLFHFNKKMFARRRILLKKNRHKRAGHGAKNKLKPITILTEKSERFRKKLIERWACEIADFFIKNKVGTVQMENLESMKRKEDSYFNIRLRGFWPYAEMQNKIEFKLKQYGIEIRKVAPNNTSKTCSKCGHLNNYFNFEYRKKNKFPHFKCEKCNFKENAAYNAALNISNPKLKSTKEEPNSKKRSLEDNETEIKVSRDTWNTKNMRSLEPPRSKKRIH

SEQ ID NO: 67 - protein, 814 aa, Artificial Sequence
  chemically synthesized
MPKKKRKVSSFLDGIDKAQDEHEKYHSNWRAMASDFNLPPVVAKEIVASCDKCQLKGEAMHGQVDCSPGIWQLDCTHLEGKVILVAVHVASGYIGAEVIPAETGQETAYFLLKLAGRWPVKTIHTDNGSNFTGATVRAACWWAGIKQEFGIPYNPQSQGVVESMNKELKKIIGQVRDQAEHLKTAVQMAVFIHNFKRKGGIGGYSAGERIVDIIATDIQTKELQKQITKIQNGGGGSGGGGSGGGGSAKNTITKTLKLRIVRPYNSAEVEKIVADEKNNREKIALEKNKDKVKEACSKHLKVAAYCTTQVERNACLFCKARKLDDKFYQKLRGQFPDAVFWQEISEIFRQLQKQAAEIYNQSLIELYYEIFIKGKGIANASSVEHYLSDVCYTRAAELFKNAAIASGLRSKIKSNFRLKELKNMKSGLPTTKSDNFPIPLVKQKGGQYTGFEISNHNSDFIIKIPFGRWQVKKEIDKYRPWEKFDFEQVQKSPKPISLLLSTQRRKRNKGWSKDEGTEAEIKKVMNGDYQTSYIEVKRGSKICEKSAWMLNLSIDVPKIDKGVDPSIIGGIAVGVKSPLVCAINNAFSRYSISDNDLFHFNKKMFARRRILLKKNRHKRAGHGAKNKLKPITILTEKSERFRKKLIERWACEIADFFIKNKVGTVQMENLESMKRKEDSYFNIRLRGFWPYAEMQNKIEFKLKQYGIEIRKVAPNNTSKTCSKCGHLNNYFNFEYRKKNKFPHFKCEKCNFKENAAYNAALNISNPKLKSTKEEPNSKKRSLEDNETEIKVSRDTWNTKNMRSLEPPRSKKRIH

SEQ ID NO: 68 - protein, 880 aa, Artificial Sequence
  chemically synthesized
MPKKKRKVSSFLDGIDKAQDEHEKYHSNWRAMASDFNLPPVVAKEIVASCDKCQLKGEAMHGQVDCSPGIWQLDCTHLEGKVILVAVHVASGYIFAEVIPAETGQETAYFLLKLAGRWPVKTIHTDNGSNFTGATVRAACWWAGIKQEFGIPYNPQSQGVVESMNKELKKIIGQVRDQAEHLKTAVQMAVFIHNFKRKGGIGGYSAGERIVDIIATDIQTKELQKQITKIQNFRVYYRDSRNPLWKGPAKLLWKGEGAVVIQDNSDIKVVPRRKAKIIRDYGKQMAGDDCVASRQDEDGGGGSGGGGSGGGGSAKNTITKTLKLRIVRPYNSAEVEKIVADEKNNREKIALEKNKDKVKEACSKHLKVAAYCTTQVERNACLFCKARKLDDKFYQKLRGQFPDAVFWQEISEIFRQLQKQAAEIYNQSLIELYYEIFIKGKGIANASSVEHYLSDVCYTRAAELFKNAAIASGLRSKIKSNFRLKELKNMKSGLPTTKSDNFPIPLVKQKGGQYTGFEISNHNSDFIIKIPFGRWQVKKEIDKYRPWEKFDFEQVQKSPKPISLLLSTQRRKRNKGWSKDEGTEAEIKKVMNGDYQTSYIEVKRGSKICEKSAWMLNLSIDVPKIDKGVDPSIIGGIAVGVKSPLVCAINNAFSRYSISDNDLFHFNKKMFARRRILLKKNRHKRAGHGAKNKLKPITILTEKSERFRKKLIERWACEIADFFIKNKVGTVQMENLESMKRKEDSYFNIRLRGFWPYAEMQNKIEFKLKQYGIEIRKVAPNNTSKTCSKCGHLNNYFNFEYRKKNKFPHFKCEKCNFKENAAYNAALNISNPKLKSTKEEPNSKKRSLEDNETEIKVSRDTWNTKNMRSLEPPRSKKRIH

SEQ ID NO: 69 - protein, 813 aa, Artificial Sequence
  chemically synthesized
MPKKKRKVSSFLDGIDKAQDEHEKYHSNWRAMASDFNLPPVVAKEIVASCDKCQLKGEAMHGQVDCSPGIWQLDCTHLEGKVILVAVHVASGYIFAEVIPAETGQETAYFLLKLAGRWPVKTIHTDNGSNFTGATVRAACWWAGIKQEFGIPYNPQSQGVVESMNKELKKIIGQVRDQAEHLKTAVQMAVFIHNFKRKGGIGGYSAGERIVDIIATDIQTKELQKQTKIQNGGGGSGGGGSGGGGSAKNTITKTLKLRIVRPYNSAEVEKIVADEKNNREKIALEKNKDKVKEACSKHLKVAAYCTTQVERNACLFCKARKLDDKFYQKLRGQFPDAVFWQEISEIFRQLQKQAAEIYNQSLIELYYEIFIKGKGIANASSVEHYLSDVCYTRAAELFKNAAIASGLRSKIKSNFRLKELKNMKSGLPTTKSDNFPIPLVKQKGGQYTGFEISNHNSDFIIKIPFGRWQVKKEIDKYRPWEKFDFEQVQKSPKPISLLLSTQRRKRNKGWSKDEGTEAEIKKVMNGDYQTSYIEVKRGSKICEKSAWMLNLSIDVPKIDKGVDPSIIGGIAVGVKSPLVCAINNAFSRYSISDNDLFHFNKKMFARRRILLKKNRHKRAGHGAKNKLKPITILTEKSERFRKKLIERWACEIADFFIKNKVGTVQMENLESMKRKEDSYFNIRLRGFWPYAEMQNKIEFKLKQYGIEIRKVAPNNTSKTCSKCGHLNNYFNFEYRKKNKFPHFKCEKCNFKENAAYNAALNISNPKLKSTKEEPNSKKRSLEDNETEIKVSRDTWNTKNMRSLEPPRSKKRIH

SEQ ID NO: 70 - protein, 880 aa, Artificial Sequence
  chemically synthesized
MPKKKRKVSSFLDGIDKAQDEHEKYHSNWRAMASDFNLPPVVAKEIVASCDKCQLKGEAMHGQVDCSPGIWQLDCTHLEGKVILVAVHVASGYIEAEVIPAETGQETAYFLLKLAGRWPVKTIHTNNGSNFTGATVRAACWWAGIKQEFGIPYNPQSQGVVESMNKELKKIIGQVRDQAEHLKTAVQMAVFIHNFKRKGGIGGYSAGERIVDIIATDIQTKELQKQITKIQNFRVYYRDSRNPLWKGPAKLLWKGEGAVVIQDNSDIKVVPRRKAKIIRDYGKQMAGDDCVASRQDEDGGGGSGGGGSGGGGSAKNTITKTLKLRIVRPYNSAEVEKIVADEKNNREKIALEKNKDKVKEACSKHLKVAAYCTTQVERNACLFCKARKLDDKFYQKLRGQFPDAVFWQEISEIFRQLQKQAAEIYNQSLIELYYEIFIKGKGIANASSVEHYLSDVCYTRAAELFKNAAIASGLRSKIKSNFRLKELKNMKSGLPTTKSDNFPIPLVKQKGGQYTGFEISNHNSDFIIKIPFGRWQVKKEIDKYRPWEKFDFEQVQKSPKPISLLLSTQRRKRNKGWSKDEGTEAEIKKVMNGDYQTSYIEVKRGSKICEKSAWMLNLSIDVPKIDKGVDPSIIGGIAVGVKSPLVCAINNAFSRYSISDNDLFHFNKKMFARRRILLKKNRHKRAGHGAKNKLKPITILTEKSERFRKKLIERWACEIADFFIKNKVGTVQMENLESMKRKEDSYFNIRLRGFWPYAEMQNKIEFKLKQYGIEIRKVAPNNTSKTCSKCGHLNNYFNFEYRKKNKFPHFKCEKCNFKENAAYNAALNISNPKLKSTKEEPNSKKRSLEDNETEIKVSRDTWNTKNMRSLEPPRSKKRIH

SEQ ID NO: 71 - protein, 814 aa, Artificial Sequence
  chemically synthesized
MPKKKRKVSSFLDGIDKAQDEHEKYHSNWRAMASDFNLPPVVAKEIVASCDKCQLKGEAMHGQVDCSPGIWQLDCTHLEGKVILVAVHVASGYIEAEVIPAETGQETAYFLLKLAGRWPVKTIHTNNGSNFTGATVRAACWWAGIKQEFGIPYNPQSQGVVESMNKELKKIIGQVRDQAEHLKTAVQMAVFIHNFKRKGGIGGYSAGERIVDIIATDIQTKELQKQITKIQNGGGGSGGGGSGGGGSAKNTITKTLKLRIVRPYNSAEVEKIVADEKNNREKIALEKNKDKVKEACSKHLKVAAYCTTQVERNACLFCKARKLDDKFYQKLRGQFPDAVFWQEISEIFRQLQKQAAEIYNQSLIELYYEIFIKGKGIANASSVEHYLSDVCYTRAAELFKNAAIASGLRSKIKSNFRLKELKNMKSGLPTTKSDNFPIPLVKQKGGQYTGFEISNHNSDFIIKIPFGRWQVKKEIDKYRPWEKFDFEQVQKSPKPISLLLSTQRRKRNKGWSKDEGTEAEIKKVMNGDYQTSYIEVKRGSKICEKSAWMLNLSIDVPKIDKGVDPSIIGGIAVGVKSPLVCAINNAFSRYSISDNDLFHFNKKMFARRRILLKKNRHKRAGHGAKNKLKPITILTEKSERFRKKLIERWACEIADFFIKNKVGTVQMENLESMKRKEDSYFNIRLRGFWPYAEMQNKIEFKLKQYGIEIRKVAPNNTSKTCSKCGHLNNYFNFEYRKKNKFPHFKCEKCNFKENAAYNAALNISNPKLKSTKEEPNSKKRSLEDNETEIKVSRDTWNTKNMRSLEPPRSKKRIH

SEQ ID NO: 72 - protein, 880 aa, Artificial Sequence
  chemically synthesized
MPKKKRKVSSFLDGIDKAQDEHEKYHSNWRAMASDFNLPPVVAKEIVASCDKCQLKGEAMHGQVDCSPGIWQLDCTHLEGKVILVAVHVASGYIEAEVIPAETGQETAYFLLKLAGRWPVKTIHTDNGSNFTGATVRAACWWAGIKQEFGIPYNPQSQGVVESMNKELKKIIGQVRDQAEHLKTAVQMAVFIHNKKRKGGIGGYSAGERIVDIIATDIQTKELQKQITKIQNFRVYYRDSRNPLWKGPAKLLWKGEGAVVIQDNSDIKVVPRRKAKIIRDYGKQMAGDDSVASRQDEDGGGGSGGGGSGGGGSAKNTITKTLKLRIVRPYNSAEVEKIVADEKNNREKIALEKNKDKVKEACSKHLKVAAYCTTQVERNACLFCKARKLDDKFYQKLRGQFPDAVFWQEISEIFRQLQKQAAEIYNQSLIELYYEIFIKGKGIANASSVEHYLSDVCYTRAAELFKNAAIASGLRSKIKSNFRLKELKNMKSGLPTTKSDNFPIPLVKQKGGQYTGFEISNHNSDFIIKIPFGRWQVKKEIDKYRPWEKFDFEQVQKSPKPISLLLSTQRRKRNKGWSKDEGTEAEIKKVMNGDYQTSYIEVKRGSKICEKSAWMLNLSIDVPKIDKGVDPSIIGGIAVGVKSPLVCAINNAFSRYSISDNDLFHFNKKMFARRRILLKKNRHKRAGHGAKNKLKPITILTEKSERFRKKLIERWACEIADFFIKNKVGTVQMENLESMKRKEDSYFNIRLRGFWPYAEMQNKIEFKLKQYGIEIRKVAPNNTSKTCSKCGHLNNYFNFEYRKKNKFPHFKCEKCNFKENAAYNAALNISNPKLKSTKEEPNSKKRSLEDNETEIKVSRDTWNTKNMRSLEPPRSKKRIH

SEQ ID NO: 73 - protein, 880 aa, Artificial Sequence
  chemically synthesized
MPKKKRKVSSFLDGIDKAQDEHEKYHSNWRAMASDFNLPPVVAKEIVASCDKCQLKGEAMHGQVDCSPGIWQLDCTHLEGKVILVAVHVASGYIEAEVIPAETGQETAYFLLKLAGRWPVKTIHTDNGSNFTGATVRAACWWAGIKQEFGIPYNPQSQGVVESMNKELKKIIGQVRDQAEHLKTAVQMAVFIHNFKRKGGIGGYSAGERIVDIIATDIQTKELQKQITKIQNFRVYYRDSRNPLWKGPAKLLWKGEGAVVIQDNSDIKVVPRRKAKIIRDYGKQMAGDDSVASRQDEDGGGGSGGGGSGGGGSAKNTITKTLKLRIVRPYNSAEVEKIVADEKNNREKIALEKNKDKVKEACSKHLKVAAYCTTQVERNACLFCKARKLDDKFYQKLRGQFPDAVFWQEISEIFRQLQKQAAEIYNQSLIELYYEIFIKGKGIANASSVEHYLSDVCYTRAAELFKNAAIASGLRSKIKSNFRLKELKNMKSGLPTTKSDNFPIPLVKQKGGQYTGFEISNHNSDFIIKIPFGRWQVKKEIDKYRPWEKFDFEQVQKSPKPISLLLSTQRRKRNKGWSKDEGTEAEIKKVMNGDYQTSYIEVKRGSKICEKSAWMLNLSIDVPKIDKGVDPSIIGGIAVGVKSPLVCAINNAFSRYSISDNDLFHFNKKMFARRRILLKKNRHKRAGHGAKNKLKPITILTEKSERFRKKLIERWACEIADFFIKNKVGTVQMENLESMKRKEDSYFNIRLRGFWPYAEMQNKIEFKLKQYGIEIRKVAPNNTSKTCSKCGHLNNYFNFEYRKKNKFPHFKCEKCNFKENAAYNAALNISNPKLKSTKEEPNSKKRSLEDNETEIKVSRDTWNTKNMRSLEPPRSKKRIH

SEQ ID NO: 74 - protein, 880 aa, Artificial Sequence
  chemically synthesized
MPKKKRKVSSFLDGIDKAQDEHEKYHSNWRAMASDFNLPPVVAKEIVASCDKCQLKGEAMHGQVDCSPGIWQLDCTHLEGKVILVAVHVASGYIEAEVIPAETGQETAYFLLKLAGRWPVKTIHTDNGSNFTGATVRAACWWAGIKQEFGIPYNPQSQGVVESMNKELKKIIGQVRDQAEHLKTAVQMAVFIHNKKRKGGIGGYSAGERIVDIIATDIQTKELQKQITKIQNFRVYYRDSRNPLWKGPAKLLWKGEGAVVIQDNSDIKVVPRRKAKIIRDYGKQMAGDDCVASRQDEDGGGGSGGGGSGGGGSAKNTITKTLKLRIVRPYNSAEVEKIVADEKNNREKIALEKNKDKVKEACSKHLKVAAYCTTQVERNACLFCKARKLDDKFYQKLRGQFPDAVFWQEISEIFRQLQKQAAEIYNQSLIELYYEIFIKGKGIANASSVEHYLSDVCYTRAAELFKNAAIASGLRSKIKSNFRLKELKNMKSGLPTTKSDNFPIPLVKQKGGQYTGFEISNHNSDFIIKIPFGRWQVKKEIDKYRPWEKFDFEQVQKSPKPISLLLSTQRRKRNKGWSKDEGTEAEIKKVMNGDYQTSYIEVKRGSKICEKSAWMLNLSIDVPKIDKGVDPSIIGGIAVGVKSPLVCAINNAFSRYSISDNDLFHFNKKMFARRRILLKKNRHKRAGHGAKNKLKPITILTEKSERFRKKLIERWACEIADFFIKNKVGTVQMENLESMKRKEDSYFNIRLRGFWPYAEMQNKIEFKLKQYGIEIRKVAPNNTSKTCSKCGHLNNYFNFEYRKKNKFPHFKCEKCNFKENAAYNAALNISNPKLKSTKEEPNSKKRSLEDNETEIKVSRDTWNTKNMRSLEPPRSKKRIH

SEQ ID NO: 75 - protein, 814 aa, Artificial Sequence
  chemically synthesized
MPKKKRKVSSFLDGIDKAQDEHEKYHSNWRAMASDFNLPPVVAKEIVASCDKCQLKGEAMHGQVDCSPGIWQLDCTHLEGKVILVAVHVASGYIEAEVIPAETGQETAYFLLKLAGRWPVKTIHTDNGSNFTGATVRAACWWAGIKQEFGIPYNPQSQGVVESMNKELKKIIGQVRDQAEHLKTAVQMAVFIHNKKRKGGIGGYSAGERIVDIIATDIQTKELQKQITKIQNGGGGSGGGGSGGGGSAKNTITKTLKLRIVRPYNSAEVEKIVADEKNNREKIALEKNKDKVKEACSKHLKVAAYCTTQVERNACLFCKARKLDDKFYQKLRGQFPDAVFWQEISEIFRQLQKQAAEIYNQSLIELYYEIFIKGKGIANASSVEHYLSDVCYTRAAELFKNAAIASGLRSKIKSNFRLKELKNMKSGLPTTKSDNFPIPLVKQKGGQYTGFEISNHNSDFIIKIPFGRWQVKKEIDKYRPWEKFDFEQVQKSPKPISLLLSTQRRKRNKGWSKDEGTEAEIKKVMNGDYQTSYIEVKRGSKICEKSAWMLNLSIDVPKIDKGVDPSIIGGIAVGVKSPLVCAINNAFSRYSISDNDLFHFNKKMFARRRILLKKNRHKRAGHGAKNKLKPITILTEKSERFRKKLIERWACEIADFFIKNKVGTVQMENLESMKRKEDSYFNIRLRGFWPYAEMQNKIEFKLKQYGIEIRKVAPNNTSKTCSKCGHLNNYFNFEYRKKNKFPHFKCEKCNFKENAAYNAALNISNPKLKSTKEEPNSKKRSLEDNETEIKVSRDTWNTKNMRSLEPPRSKKRIH

SEQ ID NO: 76 - protein, 880 aa, Artificial Sequence
  chemically synthesized
MPKKKRKVSSFLDGIDKAQDEHEKYHSNWRAMASDFNLPPVVAKEIVASCDKCQLKGEAMHGQVDCSPGIWQLDCTHLEGKVILVAVHVASGYIEAEVIPAETGQEAAYFLLKLAGRWPVKTIHTDNGSNFTGATVRAACWWAGIKQEFGIPRNPQSQGVVESMNKELKKIIGQVRDQAEHLKTAVQMAVFIHNFKRKGGIGGYSAGERIVDIIATDIQTKELQKQITKIQNFRVYYRDSRNPLWKGPAKLLWKGEGAVVIQDNSDIKVVPRRKAKIIRDYGKQMAGDDCVASRQDEDGGGGSGGGGSGGGGSAKNTITKTLKLRIVRPYNSAEVEKIVADEKNNREKIALEKNKDKVKEACSKHLKVAAYCTTQVERNACLFCKARKLDDKFYQKLRGQFPDAVFWQEISEIFRQLQKQAAEIYNQSLIELYYEIFIKGKGIANASSVEHYLSDVCYTRAAELFKNAAIASGLRSKIKSNFRLKELKNMKSGLPTTKSDNFPIPLVKQKGGQYTGFEISNHNSDFIIKIPFGRWQVKKEIDKYRPWEKFDFEQVQKSPKPISLLLSTQRRKRNKGWSKDEGTEAEIKKVMNGDYQTSYIEVKRGSKICEKSAWMLNLSIDVPKIDKGVDPSIIGGIAVGVKSPLVCAINNAFSRYSISDNDLFHFNKKMFARRRILLKKNRHKRAGHGAKNKLKPITILTEKSERFRKKLIERWACEIADFFIKNKVGTVQMENLESMKRKEDSYFNIRLRGFWPYAEMQNKIEFKLKQYGIEIRKVAPNNTSKTCSKCGHLNNYFNFEYRKKNKFPHFKCEKCNFKENAAYNAALNISNPKLKSTKEEPNSKKRSLEDNETEIKVSRDTWNTKNMRSLEPPRSKKRIH

SEQ ID NO: 77 - protein, 814 aa, Artificial Sequence
  chemically synthesized
MPKKKRKVSSFLDGIDKAQDEHEKYHSNWRAMASDFNLPPVVAKEIVASCDKCQLKGEAMHGQVDCSPGIWQLDCTHLEGKVILVAVHVASGYIEAEVIPAETGQEAAYFLLKLAGRWPVKTIHTDNGSNFTGATVRAACWWAGIKQEFGIPRNPQSQGVVESMNKELKKIIGQVRDQAEHLKTAVQMAVFIHNFKRKGGIGGYSAGERIVDIIATDIQTKELQKQITKIQNGGGGSGGGGSGGGGSAKNTITKTLKLRIVRPYNSAEVEKIVADEKNNREKIALEKNKDKVKEACSKHLKVAAYCTTQVERNACLFCKARKLDDKFYQKLRGQFPDAVFWQEISEIFRQLQKQAAEIYNQSLIELYYEIFIKGKGIANASSVEHYLSDVCYTRAAELFKNAAIASGLRSKIKSNFRLKELKNMKSGLPTTKSDNFPIPLVKQKGGQYTGFEISNHNSDFIIKIPFGRWQVKKEIDKYRPWEKFDFEQVQKSPKPISLLLSTQRRKRNKGWSKDEGTEAEIKKVMNGDYQTSYIEVKRGSKICEKSAWMLNLSIDVPKIDKGVDPSIIGGIAVGVKSPLVCAINNAFSRYSISDNDLFHFNKKMFARRRILLKKNRHKRAGHGAKNKLKPITILTEKSERFRKKLIERWACEIADFFIKNKVGTVQMENLESMKRKEDSYFNIRLRGFWPYAEMQNKIEFKLKQYGIEIRKVAPNNTSKTCSKCGHLNNYFNFEYRKKNKFPHFKCEKCNFKENAAYNAALNISNPKLKSTKEEPNSKKRSLEDNETEIKVSRDTWNTKNMRSLEPPRSKKRIH

SEQ ID NO: 78 - protein, 880 aa, Artificial Sequence
  chemically synthesized
MPKKKRKVSSFLDGIDKAQDEHEKYHSNWRAMASDFNLPPVVAKEIVASCDKCQLKGEAMHGQVDCSPGIWQLDCTHLEGKVILVAVHVASGYIEAEVIPAETGQETAYFLLKLAGRWPVKTIHTDNGSNFTGATVRAACWWAGIKQEFSIPYNPQSHGVVESMNKELKKIIGQVRDQAEHLKTAVQMAVFIHNFKRKGGIGGYSAGERIVDIIATDIQTKELQKQITKIQNFRVYYRDSRNPLWKGPAKLLWKGEGAVVIQDNSDIKVVPRRKAKIIRDYGKQMAGDDCVASRQDEDGGGGSGGGGSGGGGSAKNTITKTLKLRIVRPYNSAEVEKIVADEKNNREKIALEKNKDKVKEACSKHLKVAAYCTTQVERNACLFCKARKLDDKFYQKLRGQFPDAVFWQEISEIFRQLQKQAAEIYNQSLIELYYEIFIKGKGIANASSVEHYLSDVCYTRAAELFKNAAIASGLRSKIKSNFRLKELKNMKSGLPTTKSDNFPIPLVKQKGGQYTGFEISNHNSDFIIKIPFGRWQVKKEIDKYRPWEKFDFEQVQKSPKPISLLLSTQRRKRNKGWSKDEGTEAEIKKVMNGDYQTSYIEVKRGSKICEKSAWMLNLSIDVPKIDKGVDPSIIGGIAVGVKSPLVCAINNAFSRYSISDNDLFHFNKKMFARRRILLKKNRHKRAGHGAKNKLKPITILTEKSERFRKKLIERWACEIADFFIKNKVGTVQMENLESMKRKEDSYFNIRLRGFWPYAEMQNKIEFKLKQYGIEIRKVAPNNTSKTCSKCGHLNNYFNFEYRKKNKFPHFKCEKCNFKENAAYNAALNISNPKLKSTKEEPNSKKRSLEDNETEIKVSRDTWNTKNMRSLEPPRSKKRIH

SEQ ID NO: 79 - protein, 814 aa, Artificial Sequence
  chemically synthesized
MPKKKRKVSSFLDGIDKAQDEHEKYHSNWRAMASDFNLPPVVAKEIVASCDKCQLKGEAMHGQVDCSPGIWQLDCTHLEGKVILVAVHVASGYIEAEVIPAETGQETAYFLLKLAGRWPVKTIHTDNGSNFTGATVRAACWWAGIKQEFSIPYNPQSHGVVESMNKELKKIIGQVRDQAEHLKTAVQMAVFIHNFKRKGGIGGYSAGERIVDIIATDIQTKELQKQITKIQNGGGGSGGGGSGGGGSAKNTITKTLKLRIVRPYNSAEVEKIVADEKNNREKIALEKNKDKVKEACSKHLKVAAYCTTQVERNACLFCKARKLDDKFYQKLRGQFPDAVFWQEISEIFRQLQKQAAEIYNQSLIELYYEIFIKGKGIANASSVEHYLSDVCYTRAAELFKNAAIASGLRSKIKSNFRLKELKNMKSGLPTTKSDNFPIPLVKQKGGQYTGFEISNHNSDFIIKIPFGRWQVKKEIDKYRPWEKFDFEQVQKSPKPISLLLSTQRRKRNKGWSKDEGTEAEIKKVMNGDYQTSYIEVKRGSKICEKSAWMLNLSIDVPKIDKGVDPSIIGGIAVGVKSPLVCAINNAFSRYSISDNDLFHFNKKMFARRRILLKKNRHKRAGHGAKNKLKPITILTEKSERFRKKLIERWACEIADFFIKNKVGTVQMENLESMKRKEDSYFNIRLRGFWPYAEMQNKIEFKLKQYGIEIRKVAPNNTSKTCSKCGHLNNYFNFEYRKKNKFPHFKCEKCNFKENAAYNAALNISNPKLKSTKEEPNSKKRSLEDNETEIKVSRDTWNTKNMRSLEPPRSKKRIH

SEQ ID NO: 80 - protein, 915 aa, Artificial Sequence
  chemically synthesized
MPKKKRKVSSPLREAKDLHTALHIGPRALSKACNISMQQAREVVQTCPHCNSAPALEAGVNPRGLGPLQIWQTDFTLEPRMAPRSWLAVTVDTASSAIVVTQHGRVTSVAVQHHWATAIAVLGRPKAIKTDNGSCFTSKSTREWLARWGIAHTTGIPGNSQGQAMVERANRLLKDRIRVLAEGDGFMKRIPTSKQGELLAKAMYALNHFERGENTKTPIQKHWRPTVLTEGPPVKIRIETGEWEKGWNVLVWGRGYAAVKNRDTDKVIWVPSRKVKPDITQKDEVTKKDEASPLFAGISDWIPWEDEQEGLQGETASNKQERPGEDTLAANESGGGGSGGGGSGGGGSAKNTITKTLKLRIVRPYNSAEVEKIVADEKNNREKIALEKNKDKVKEACSKHLKVAAYCTTQVERNACLFCKARKLDDKFYQKLRGQFPDAVFWQEISEIFRQLQKQAAEIYNQSLIELYYEIFIKGKGIANASSVEHYLSDVCYTRAAELFKNAAIASGLRSKIKSNFRLKELKNMKSGLPTTKSDNFPIPLVKQKGGQYTGFEISNHNSDFIIKIPFGRWQVKKEIDKYRPWEKFDFEQVQKSPKPISLLLSTQRRKRNKGWSKDEGTEAEIKKVMNGDYQTSYIEVKRGSKICEKSAWMLNLSIDVPKIDKGVDPSIIGGIAVGVKSPLVCAINNAFSRYSISDNDLFHFNKKMFARRRILLKKNRHKRAGHGAKNKLKPITILTEKSERFRKKLIERWACEIADFFIKNKVGTVQMENLESMKRKEDSYFNIRLRGFWPYAEMQNKIEFKLKQYGIEIRKVAPNNTSKTCSKCGHLNNYFNFEYRKKNKFPHFKCEKCNFKENAAYNAALNISNPKLKSTKEEPNSKKRSLEDNETEIKVSRDTWNTKNMRSLEPPRSKKRIH

SEQ ID NO: 81 - protein, 813 aa, Artificial Sequence
  chemically synthesized
MPKKKRKVSSPLREAKDLHTALHIGPRALSKACNISMQQAREVVQTCPHCNSAPALEAGVNPRGLGPLQIWQTDFTLEPRMAPRSWLAVTVDTASSAIVVTQHGRVTSVAVQHHWATAIAVLGRPKAIKTDNGSCFTSKSTREWLARWGIAHTTGIPGNSQGQAMVERANRLLKDRIRVLAEGDGFMKRIPTSKQGELLAKAMYALNHFERGENTKTPIQKHWRPTVLTEGGGGGSGGGGSGGGGSAKNTITKTLKLRIVRPYNSAEVEKIVADEKNNREKIALEKNKDKVKEACSKHLKVAAYCTTQVERNACLFCKARKLDDKFYQKLRGQFPDAVFWQEISEIFRQLQKQAAEIYNQSLIELYYEIFIKGKGIANASSVEHYLSDVCYTRAAELFKNAAIASGLRSKIKSNFRLKELKNMKSGLPTTKSDNFPIPLVKQKGGQYTGFEISNHNSDFIIKIPFGRWQVKKEIDKYRPWEKFDFEQVQKSPKPISLLLSTQRRKRNKGWSKDEGTEAEIKKVMNGDYQTSYIEVKRGSKICEKSAWMLNLSIDVPKIDKGVDPSIIGGIAVGVKSPLVCAINNAFSRYSISDNDLFHFNKKMFARRRILLKKNRHKRAGHGAKNKLKPITILTEKSERFRKKLIERWACEIADFFIKNKVGTVQMENLESMKRKEDSYFNIRLRGFWPYAEMQNKIEFKLKQYGIEIRKVAPNNTSKTCSKCGHLNNYFNFEYRKKNKFPHFKCEKCNFKENAAYNAALNISNPKLKSTKEEPNSKKRSLEDNETEIKVSRDTWNTKNMRSLEPPRSKKRIH

SEQ ID NO: 82 - protein, 984 aa, Artificial Sequence
  chemically synthesized
MPKKKRKVSSCNTKKPNLDAELDQLLQGHYIKGYPKQYTYFLEDGKVKVSRPEGVKIIPPQSDRQKIVLQAHNLAHTGREATLLKIANLYWWPNMRKDVVKQLGRCQQCLITNASNKASGPILRPDRPQKPFDKFFIDYIGPLPPSQGYLYVLVVVDGMTGFTWLYPTKAPSTSATVKSLNVLTSIAIPKVIHSDQGAAFTSSTFAEWAKERGIHLEFSTPYHPQSGSKVERKNSDIKRLLTKLLVGRPTKWYDLLPVVQLALNNTYSPVLKYTPHQLLFGIDSNTPFANQDTLDLTREEELSLLQEIRTSLYHPSTPPASSRSWSPVVGQLVQERVARPASLRPRWHKPSTVLKVLNPRTVVILDHLGNNRTVSIDNLKPTSHQNGTTNDTATMDHLEKNEGGGGSGGGGSGGGGSAKNTITKTLKLRIVRPYNSAEVEKIVADEKNNREKIALEKNKDKVKEACSKHLKVAAYCTTQVERNACLFCKARKLDDKFYQKLRGQFPDAVFWQEISEIFRQLQKQAAEIYNQSLIELYYEIFIKGKGIANASSVEHYLSDVCYTRAAELFKNAAIASGLRSKIKSNFRLKELKNMKSGLPTTKSDNFPIPLVKQKGGQYTGFEISNHNSDFIIKIPFGRWQVKKEIDKYRPWEKFDFEQVQKSPKPISLLLSTQRRKRNKGWSKDEGTEAEIKKVMNGDYQTSYIEVKRGSKICEKSAWMLNLSIDVPKIDKGVDPSIIGGIAVGVKSPLVCAINNAFSRYSISDNDLFHFNKKMFARRRILLKKNRHKRAGHGAKNKLKPITILTEKSERFRKKLIERWACEIADFFIKNKVGTVQMENLESMKRKEDSYFNIRLRGFWPYAEMQNKIEFKLKQYGIEIRKVAPNNTSKTCSKCGHLNNYFNFEYRKKNKFPHFKCEKCNFKENAAYNAALNISNPKLKSTKEEPNSKKRSLEDNETEIKVSRDTWNTKNMRSLEPPRSKKRIH

SEQ ID NO: 83 - protein, 908 aa, Artificial Sequence
  chemically synthesized
MPKKKRKVSSCNTKKPNLDAELDQLLQGHYIKGYPKQYTYFLEDGKVKVSRPEGVKIIPPQSDRQKIVLQAHNLAHTGREATLLKIANLYWWPNMRKDVVKQLGRCQQCLITNASNKASGPILRPDRPQKPFDKFFIDYIGPLPPSQGYLYVLVVVDGMTGFTWLYPTKAPSTSATVKSLNVLTSIAIPKVIHSDQGAAFTSSTFAEWAKERGIHLEFSTPYHPQSGSKVERKNSDIKRLLTKLLVGRPTKWYDLLPVVQLALNNTYSPVLKYTPHQLLFGIDSNTPFANQDTLDLTREEELSLLQEIRTSLYHPSTPPASSRSWSGGGGSGGGGSGGGGSAKNTITKTLKLRIVRPYNSAEVEKIVADEKNNREKIALEKNKDKVKEACSKHLKVAAYCTTQVERNACLFCKARKLDDKFYQKLRGQFPDAVFWQEISEIFRQLQKQAAEIYNQSLIELYYEIFIKGKGIANASSVEHYLSDVCYTRAAELFKNAAIASGLRSKIKSNFRLKELKNMKSGLPTTKSDNFPIPLVKQKGGQYTGFEISNHNSDFIIKIPFGRWQVKKEIDKYRPWEKFDFEQVQKSPKPISLLLSTQRRKRNKGWSKDEGTEAEIKKVMNGDYQTSYIEVKRGSKICEKSAWMLNLSIDVPKIDKGVDPSIIGGIAVGVKSPLVCAINNAFSRYSISDNDLFHFNKKMFARRRILLKKNRHKRAGHGAKNKLKPITILTEKSERFRKKLIERWACEIADFFIKNKVGTVQMENLESMKRKEDSYFNIRLRGFWPYAEMQNKIEFKLKQYGIEIRKVAPNNTSKTCSKCGHLNNYFNFEYRKKNKFPHFKCEKCNFKENAAYNAALNISNPKLKSTKEEPNSKKRSLEDNETEIKVSRDTWNTKNMRSLEPPRSKKRIH

SEQ ID NO: 84 - protein, 869 aa, Artificial Sequence
  chemically synthesized
MPKKKRKVSSGSTGVFWVENIQEAQDEHENWHTSPKILARNYKIPLTVAKQITQECPHCTKQGSGPAGCVMRSPNHWQADCTHLDNKIILTFVESNSGYIHATLLSKENALCTSLAILEWARLFSPKSLHTDNGTNFVAEPVVNLLKFLKIAHTTGIPYHPESQGIVERANRTLKEKIQSHRDNTQTLEAALQLALITCNKGRESMGGQTPWEVFITNQAQVIHEKLLLQQAQSSKKFCFYKIPGEHDWKGPTRVLWKGDGAVVVNDEGKGIIAVPLTRTKLLIKPNGGGGSGGGGSGGGGSAKNTITKTLKLRIVRPYNSAEVEKIVADEKNNREKIALEKNKDKVKEACSKHLKVAAYCTTQVERNACLFCKARKLDDKFYQKLRGQFPDAVFWQEISEIFRQLQKQAAEIYNQSLIELYYEIFIKGKGIANASSVEHYLSDVCYTRAAELFKNAAIASGLRSKIKSNFRLKELKNMKSGLPTTKSDNFPIPLVKQKGGQYTGFEISNHNSDFIIKIPFGRWQVKKEIDKYRPWEKFDFEQVQKSPKPISLLLSTQRRKRNKGWSKDEGTEAEIKKVMNGDYQTSYIEVKRGSKICEKSAWMLNLSIDVPKIDKGVDPSIIGGIAVGVKSPLVCAINNAFSRYSISDNDLFHFNKKMFARRRILLKKNRHKRAGHGAKNKLKPITILTEKSERFRKKLIERWACEIADFFIKNKVGTVQMENLESMKRKEDSYFNIRLRGFWPYAEMQNKIEFKLKQYGIEIRKVAPNNTSKTCSKCGHLNNYFNFEYRKKNKFPHFKCEKCNFKENAAYNAALNISNPKLKSTKEEPNSKKRSLEDNETEIKVSRDTWNTKNMRSLEPPRSKKRIH

SEQ ID NO: 85 - protein, 817 aa, Artificial Sequence
  chemically synthesized
MPKKKRKVSSGSTGVFWVENIQEAQDEHENWHTSPKILARNYKIPLTVAKQITQECPHCTKQGSGPAGCVMRSPNHWQADCTHLDNKIILTFVESNSGYIHATLLSKENALCTSLAILEWARLFSPKSLHTDNGTNFVAEPVVNLLKFLKIAHTTGIPYHPESQGIVERANRTLKEKIQSHRDNTQTLEAALQLALITCNKGRESMGGQTPWEVFITNQAQVIHEKLLLQQAQSSGGGGSGGGGSGGGGSAKNTITKTLKLRIVRPYNSAEVEKIVADEKNNREKIALEKNKDKVKEACSKHLKVAAYCTTQVERNACLFCKARKLDDKFYQKLRGQFPDAVFWQEISEIFRQLQKQAAEIYNQSLIELYYEIFIKGKGIANASSVEHYLSDVCYTRAAELFKNAAIASGLRSKIKSNFRLKELKNMKSGLPTTKSDNFPIPLVKQKGGQYTGFEISNHNSDFIIKIPFGRWQVKKEIDKYRPWEKFDFEQVQKSPKPISLLLSTQRRKRNKGWSKDEGTEAEIKKVMNGDYQTSYIEVKRGSKICEKSAWMLNLSIDVPKIDKGVDPSIIGGIAVGVKSPLVCAINNAFSRYSISDNDLFHFNKKMFARRRILLKKNRHKRAGHGAKNKLKPITILTEKSERFRKKLIERWACEIADFFIKNKVGTVQMENLESMKRKEDSYFNIRLRGFWPYAEMQNKIEFKLKQYGIEIRKVAPNNTSKTCSKCGHLNNYFNFEYRKKNKFPHFKCEKCNFKENAAYNAALNISNPKLKSTKEEPNSKKRSLEDNETEIKVSRDTWNTKNMRSLEPPRSKKRIH

SEQ ID NO: 86 - protein, 1000 aa, Artificial Sequence
  chemically synthesized
MPKKKRKVSSIENSSPYTSEHFHYTVTDIKDLTKLGAIYDKTKKYWVYQGKPVMPDQFTFELLDFLHQLTHLSFSKMKALLERSHSPYYMLNRDRTLKNITETCKACAQVNASKSAVKQGTRVRGHRPGTHWEIDFTEIKPGLYGYKYLLVFIDTFSGWIEAFPTKKETAKVVTKKLLEEIFPRFGMPQVLGTDNGPAFVSKVSQTVADLLGIDWKLHCAYRPQSSGQVERMNRTIKETLTKLTLATGSRDWVLLLPLALYRARNTPGPHGLTPYEILYGAPPPLVNFPDPDMTRVTNSPSLQAHLQALYLVQHEVWRPLAAAYQEQLDRPVVPHPYRVGDTVWVRRHQTKNLEPRWKGPYTVLLTTPTALKVDGIAAWIHAAHVKAADPGGGPSSRLTWRVQRSQNPLKIRLTREAPGGGGSGGGGSGGGGSAKNTITKTLKLRIVRPYNSAEVEKIVADEKNNREKIALEKNKDKVKEACSKHLKVAAYCTTQVERNACLFCKARKLDDKFYQKLRGQFPDAVFWQEISEIFRQLQKQAAEIYNQSLIELYYEIFIKGKGIANASSVEHYLSDVCYTRAAELFKNAAIASGLRSKIKSNFRLKELKNMKSGLPTTKSDNFPIPLVKQKGGQYTGFEISNHNSDFIIKIPFGRWQVKKEIDKYRPWEKFDFEQVQKSPKPISLLLSTQRRKRNKGWSKDEGTEAEIKKVMNGDYQTSYIEVKRGSKICEKSAWMLNLSIDVPKIDKGVDPSIIGGIAVGVKSPLVCAINNAFSRYSISDNDLFHFNKKMFARRRILLKKNRHKRAGHGAKNKLKPITILTEKSERFRKKLIERWACEIADFFIKNKVGTVQMENLESMKRKEDSYFNIRLRGFWPYAEMQNKIEFKLKQYGIEIRKVAPNNTSKTCSKCGHLNNYFNFEYRKKNKFPHFKCEKCNFKENAAYNAALNISNPKLKSTKEEPNSKKRSLEDNETEIKVSRDTWNTKNMRSLEPPRSKKRIH

SEQ ID NO: 87 - protein, 918 aa, Artificial Sequence
  chemically synthesized
MPKKKRKVSSIENSSPYTSEHFHYTVTDIKDLTKLGAIYDKTKKYWVYQGKPVMPDQFTFELLDFLHQLTHLSFSKMKALLERSHSPYYMLNRDRTLKNITETCKACAQVNASKSAVKQGTRVRGHRPGTHWEIDFTEIKPGLYGYKYLLVFIDTFSGWIEAFPTKKETAKVVTKKLLEEIFPRFGMPQVLGTDNGPAFVSKVSQTVADLLGIDWKLHCAYRPQSSGQVERMNRTIKETLTKLTLATGSRDWVLLLPLALYRARNTPGPHGLTPYEILYGAPPPLVNFPDPDMTRVTNSPSLQAHLQALYLVQHEVWRPLAAAYQEQLDRPVVPHPGGGGSGGGGSGGGGSAKNTITKTLKLRIVRPYNSAEVEKIVADEKNNREKIALEKNKDKVKEACSKHLKVAAYCTTQVERNACLFCKARKLDDKFYQKLRGQFPDAVFWQEISEIFRQLQKQAAEIYNQSLIELYYEIFIKGKGIANASSVEHYLSDVCYTRAAELFKNAAIASGLRSKIKSNFRLKELKNMKSGLPTTKSDNFPIPLVKQKGGQYTGFEISNHNSDFIIKIPFGRWQVKKEIDKYRPWEKFDFEQVQKSPKPISLLLSTQRRKRNKGWSKDEGTEAEIKKVMNGDYQTSYIEVKRGSKICEKSAWMLNLSIDVPKIDKGVDPSIIGGIAVGVKSPLVCAINNAFSRYSISDNDLFHFNKKMFARRRILLKKNRHKRAGHGAKNKLKPITILTEKSERFRKKLIERWACEIADFFIKNKVGTVQMENLESMKRKEDSYFNIRLRGFWPYAEMQNKIEFKLKQYGIEIRKVAPNNTSKTCSKCGHLNNYFNFEYRKKNKFPHFKCEKCNFKENAAYNAALNISNPKLKSTKEEPNSKKRSLEDNETEIKVSRDTWNTKNMRSLEPPRSKKRIH

SEQ ID NO: 88 - protein, 910 aa, Artificial Sequence
  chemically synthesized
MPKKKRKVSSLESAQESHALHHQNAAALRFQFHITREQAREIVKLCPNCPDWGHAPQLGVNPRGLKPRVLWQMDVTHVSEFGKLKYVHVTVDTYSHFTFATARTGEATKDVLQHLAQSFAYMGIPQKIKTDNAPAYVSRSIQEFLARWKISHVTGIPYNPQGQAIVERTHQNIKAQLNKLQKAGKYYTPHHLLAHALFVLNHVNMDNQGHTAAERHWGPISADPKPMVMWKDLLTGSWKGPDVLITAGRGYACVFPQDAETPIWVPDRFIRPFTERKEATPTPGTAEKTPPRDEKDQQESPKNESSPHQREDGLATSAGVDLRSGGGPGGGGSGGGGSGGGGSAKNTITKTLKLRIVRPYNSAEVEKIVADEKNNREKIALEKNKDKVKEACSKHLKVAAYCTTQVERNACLFCKARKLDDKFYQKLRGQFPDAVFWQEISEIFRQLQKQAAEIYNQSLIELYYEIFIKGKGIANASSVEHYLSDVCYTRAAELFKNAAIASGLRSKIKSNFRLKELKNMKSGLPTTKSDNFPIPLVKQKGGQYTGFEISNHNSDFIIKIPFGRWQVKKEIDKYRPWEKFDFEQVQKSPKPISLLLSTQRRKRNKGWSKDEGTEAEIKKVMNGDYQTSYIEVKRGSKICEKSAWMLNLSIDVPKIDKGVDPSIIGGIAVGVKSPLVCAINNAFSRYSISDNDLFHFNKKMFARRRILLKKNRHKRAGHGAKNKLKPITILTEKSERFRKKLIERWACEIADFFIKNKVGTVQMENLESMKRKEDSYFNIRLRGFWPYAEMQNKIEFKLKQYGIEIRKVAPNNTSKTCSKCGHLNNYFNFEYRKKNKFPHFKCEKCNFKENAAYNAALNISNPKLKSTKEEPNSKKRSLEDNETEIKVSRDTWNTKNMRSLEPPRSKKRIH

SEQ ID NO: 89 - protein, 804 aa, Artificial Sequence
  chemically synthesized
MPKKKRKVSSLESAQESHALHHQNAAALRFQFHITREQAREIVKLCPNCPDWGHAPQLGVNPRGLKPRVLWQMDVTHVSEFGKLKYVHVTVDTYSHFTFATARTGEATKDVLQHLAQSFAYMGIPQKIKTDNAPAYVSRSIQEFLARWKISHVTGIPYNPQGQAIVERTHQNIKAQLNKLQKAGKYYTPHHLLAHALFVLNHVNMDNQGHTAAERHWGPISAGGGGSGGGGSGGGGSAKNTITKTLKLRIVRPYNSAEVEKIVADEKNNREKIALEKNKDKVKEACSKHLKVAAYCTTQVERNACLFCKARKLDDKFYQKLRGQFPDAVFWQEISEIFRQLQKQAAEIYNQSLIELYYEIFIKGKGIANASSVEHYLSDVCYTRAAELFKNAAIASGLRSKIKSNFRLKELKNMKSGLPTTKSDNFPIPLVKQKGGQYTGFEISNHNSDFIIKIPFGRWQVKKEIDKYRPWEKFDFEQVQKSPKPISLLLSTQRRKRNKGWSKDEGTEAEIKKVMNGDYQTSYIEVKRGSKICEKSAWMLNLSIDVPKIDKGVDPSIIGGIAVGVKSPLVCAINNAFSRYSISDNDLFHFNKKMFARRRILLKKNRHKRAGHGAKNKLKPITILTEKSERFRKKLIERWACEIADFFIKNKVGTVQMENLESMKRKEDSYFNIRLRGFWPYAEMQNKIEFKLKQYGIEIRKVAPNNTSKTCSKCGHLNNYFNFEYRKKNKFPHFKCEKCNFKENAAYNAALNISNPKLKSTKEEPNSKKRSLEDNETEIKVSRDTWNTKNMRSLEPPRSKKRIH

SEQ ID NO: 90 - protein, 972 aa, Artificial Sequence
  chemically synthesized
MPKKKRKVSSVLKKGDALASTDLVMEYSETDEKFTAGAELHDGVFMRGDLIVPPLEMLHAILLAIHGVSHTHKGGIMSYFSKFWTHPKASQTIDLILGHCQICLKHNPKYKSRLQGHRPLPSRPFAHLQIDFVQMCVKKPMYALVIIDVFSKWPEIIPCNKEDAKTVCDILMKDIIPRWGLPDQIDSDQGTHFTAKISQELTHSIGVAWKLHCPGHPRSSGIVERTNRTLKSKIIKAQEQLQLSKWTEVLPYVLLEMRATPKKHGLSPHEIVMGRPMKTTYLSDMSPLWATDTLVTYMNKLTRQLSAYHQQVVDQWPSTSLPPGPEPGSWCMLRNPKKSSNWEGPFLILLSTPTAVKVEGRPTWIHLDHCKLLRSSLSSSLGGPVNQLLSGGGGSGGGGSGGGGSAKNTITKTLKLRIVRPYNSAEVEKIVADEKNNREKIALEKNKDKVKEACSKHLKVAAYCTTQVERNACLFCKARKLDDKFYQKLRGQFPDAVFWQEISEIFRQLQKQAAEIYNQSLIELYYEIFIKGKGIANASSVEHYLSDVCYTRAAELFKNAAIASGLRSKIKSNFRLKELKNMKSGLPTTKSDNFPIPLVKQKGGQYTGFEISNHNSDFIIKIPFGRWQVKKEIDKYRPWEKFDFEQVQKSPKPISLLLSTQRRKRNKGWSKDEGTEAEIKKVMNGDYQTSYIEVKRGSKICEKSAWMLNLSIDVPKIDKGVDPSIIGGIAVGVKSPLVCAINNAFSRYSISDNDLFHFNKKMFARRRILLKKNRHKRAGHGAKNKLKPITILTEKSERFRKKLIERWACEIADFFIKNKVGTVQMENLESMKRKEDSYFNIRLRGFWPYAEMQNKIEFKLKQYGIEIRKVAPNNTSKTCSKCGHLNNYFNFEYRKKNKFPHFKCEKCNFKENAAYNAALNISNPKLKSTKEEPNSKKRSLEDNETEIKVSRDTWNTKNMRSLEPPRSKKRIH

SEQ ID NO: 91 - protein, 903 aa, Artificial Sequence
  chemically synthesized
MPKKKRKVSSVLKKGDALASTDLVMEYSETDEKFTAGAELHDGVFMRGDLIVPPLEMLHAILLAIHGVSHTHKGGIMSYFSKFWTHPKASQTIDLILGHCQICLKHNPKYKSRLQGHRPLPSRPFAHLQIDFVQMCVKKPMYALVIIDVFSKWPEIIPCNKEDAKTVCDILMKDIIPRWGLPDQIDSDQGTHFTAKISQELTHSIGVAWKLHCPGHPRSSGIVERTNRTLKSKIIKAQEQLQLSKWTEVLPYVLLEMRATPKKHGLSPHEIVMGRPMKTTYLSDMSPLWATDTLVTYMNKLTRQLSAYHQQVVDQWPSTSLGGGGSGGGGSGGGGSAKNTITKTLKLRIVRPYNSAEVEKIVADEKNNREKIALEKNKDKVKEACSKHLKVAAYCTTQVERNACLFCKARKLDDKFYQKLRGQFPDAVFWQEISEIFRQLQKQAAEIYNQSLIELYYEIFIKGKGIANASSVEHYLSDVCYTRAAELFKNAAIASGLRSKIKSNFRLKELKNMKSGLPTTKSDNFPIPLVKQKGGQYTGFEISNHNSDFIIKIPFGRWQVKKEIDKYRPWEKFDFEQVQKSPKPISLLLSTQRRKRNKGWSKDEGTEAEIKKVMNGDYQTSYIEVKRGSKICEKSAWMLNLSIDVPKIDKGVDPSIIGGIAVGVKSPLVCAINNAFSRYSISDNDLFHFNKKMFARRRILLKKNRHKRAGHGAKNKLKPITILTEKSERFRKKLIERWACEIADFFIKNKVGTVQMENLESMKRKEDSYFNIRLRGFWPYAEMQNKIEFKLKQYGIEIRKVAPNNTSKTCSKCGHLNNYFNFEYRKKNKFPHFKCEKCNFKENAAYNAALNISNPKLKSTKEEPNSKKRSLEDNETEIKVSRDTWNTKNMRSLEPPRSKKRIH

SEQ ID NO: 92 - protein, 888 aa, Artificial Sequence
  chemically synthesized
MPKKKRKVSSLPLETPEQWHKLTHCNSRALSRWPNPRISAWDPRSPATLCETCQKLNPTGGGKMRTIQRGWAPNHIWQADITHYKYKQFTYALHVFVDTYSGATHASAKRGLTTQMTIEGLLEAIVHLGRPKKLNTDQGANYTSKTFVRFCQQFGVSLSHHVPYNPTSSGLVERTNGLLKLLLSKYHLDEPHLPMTQALSRALWTHNQINLLPILKTRWELHHSPPLAVISEGGETPKGSDKLFLYKLPGQNNRRWLGPLPALVEASGGALLATDPPVWVPWRLLKAFKCLKNDGPEDAHNRSSDGGGGGSGGGGSGGGGSAKNTITKTLKLRIVRPYNSAEVEKIVADEKNNREKIALEKNKDKVKEACSKHLKVAAYCTTQVERNACLFCKARKLDDKFYQKLRGQFPDAVFWQEISEIFRQLQKQAAEIYNQSLIELYYEIFIKGKGIANASSVEHYLSDVCYTRAAELFKNAAIASGLRSKIKSNFRLKELKNMKSGLPTTKSDNFPIPLVKQKGGQYTGFEISNHNSDFIIKIPFGRWQVKKEIDKYRPWEKFDFEQVQKSPKPISLLLSTQRRKRNKGWSKDEGTEAEIKKVMNGDYQTSYIEVKRGSKICEKSAWMLNLSIDVPKIDKGVDPSIIGGIAVGVKSPLVCAINNAFSRYSISDNDLFHFNKKMFARRRILLKKNRHKRAGHGAKNKLKPITILTEKSERFRKKLIERWACEIADFFIKNKVGTVQMENLESMKRKEDSYFNIRLRGFWPYAEMQNKIEFKLKQYGIEIRKVAPNNTSKTCSKCGHLNNYFNFEYRKKNKFPHFKCEKCNFKENAAYNAALNISNPKLKSTKEEPNSKKRSLEDNETEIKVSRDTWNTKNMRSLEPPRSKKRIH

SEQ ID NO: 93 - protein, 819 aa, Artificial Sequence
  chemically synthesized
MPKKKRKVSSLPLETPEQWHKLTHCNSRALSRWPNPRISAWDPRSPATLCETCQKLNPTGGGKMRTIQRGWAPNHIWQADITHYKYKQFTYALHVFVDTYSGATHASAKRGLTTQMTIEGLLEAIVHLGRPKKLNTDQGANYTSKTFVRFCQQFGVSLSHHVPYNPTSSGLVERTNGLLKLLLSKYHLDEPHLPMTQALSRALWTHNQINLLPILKTRWELHHSPPLAVISEGGETPGGGGSGGGGSGGGGSAKNTITKTLKLRIVRPYNSAEVEKIVADEKNNREKIALEKNKDKVKEACSKHLKVAAYCTTQVERNACLFCKARKLDDKFYQKLRGQFPDAVFWQEISEIFRQLQKQAAEIYNQSLIELYYEIFIKGKGIANASSVEHYLSDVCYTRAAELFKNAAIASGLRSKIKSNFRLKELKNMKSGLPTTKSDNFPIPLVKQKGGQYTGFEISNHNSDFIIKIPFGRWQVKKEIDKYRPWEKFDFEQVQKSPKPISLLLSTQRRKRNKGWSKDEGTEAEIKKVMNGDYQTSYIEVKRGSKICEKSAWMLNLSIDVPKIDKGVDPSIIGGIAVGVKSPLVCAINNAFSRYSISDNDLFHFNKKMFARRRILLKKNRHKRAGHGAKNKLKPITILTEKSERFRKKLIERWACEIADFFIKNKVGTVQMENLESMKRKEDSYFNIRLRGFWPYAEMQNKIEFKLKQYGIEIRKVAPNNTSKTCSKCGHLNNYFNFEYRKKNKFPHFKCEKCNFKENAAYNAALNISNPKLKSTKEEPNSKKRSLEDNETEIKVSRDTWNTKNMRSLEPPRSKKRIH

SEQ ID NO: 94 - protein, 885 aa, Artificial Sequence
  chemically synthesized
MPKKKRKVSSFLEKIEPAQEEHDKYHSNVKELVFKFGLPRIVARQIVDTCDKCHQKGEAIHGQANSDLGTWQMDCTHLEGKIIIVAVHVASGFIEAEVIPQETGRQTALFLLKLAGRWPITHLHTDNGANFASQEVKMVAWWAGIEHTFGVPYNPQSQGVVEAMNHHLKNQIDRIREQANSVETIVLMAVHCMNFKRRGGIGDMTPAERLINMITTEQEIQFQQSKNSKFKNFRVYYREGRDQLWKGPGELLWKGEGAVILKVGTDIKVVPRRKAKIIKDYGGGKEVDSSSHMEDTGEAREVAGGGGSGGGGSGGGGSAKNTITKTLKLRIVRPYNSAEVEKIVADEKNNREKIALEKNKDKVKEACSKHLKVAAYCTTQVERNACLFCKARKLDDKFYQKLRGQFPDAVFWQEISEIFRQLQKQAAEIYNQSLIELYYEIFIKGKGIANASSVEHYLSDVCYTRAAELFKNAAIASGLRSKIKSNFRLKELKNMKSGLPTTKSDNFPIPLVKQKGGQYTGFEISNHNSDFIIKIPFGRWQVKKEIDKYRPWEKFDFEQVQKSPKPISLLLSTQRRKRNKGWSKDEGTEAEIKKVMNGDYQTSYIEVKRGSKICEKSAWMLNLSIDVPKIDKGVDPSIIGGIAVGVKSPLVCAINNAFSRYSISDNDLFHFNKKMFARRRILLKKNRHKRAGHGAKNKLKPITILTEKSERFRKKLIERWACEIADFFIKNKVGTVQMENLESMKRKEDSYFNIRLRGFWPYAEMQNKIEFKLKQYGIEIRKVAPNNTSKTCSKCGHLNNYFNFEYRKKNKFPHFKCEKCNFKENAAYNAALNISNPKLKSTKEEPNSKKRSLEDNETEIKVSRDTWNTKNMRSLEPPRSKKRIH

SEQ ID NO: 95 - protein, 814 aa, Artificial Sequence
  chemically synthesized
MPKKKRKVSSFLEKIEPAQEEHDKYHSNVKELVFKFGLPRIVARQIVDTCDKCHQKGEAIHGQANSDLGTWQMDCTHLEGKIIIVAVHVASGFIEAEVIPQETGRQTALFLLKLAGRWPITHLHTDNGANFASQEVKMVAWWAGIEHTFGVPYNPQSQGVVEAMNHHLKNQIDRIREQANSVETIVLMAVHCMNFKRRGGIGDMTPAERLINMITTEQEIQFQQSKNSKFKNGGGGSGGGGSGGGGSAKNTITKTLKLRIVRPYNSAEVEKIVADEKNNREKIALEKNKDKVKEACSKHLKVAAYCTTQVERNACLFCKARKLDDKFYQKLRGQFPDAVFWQEISEIFRQLQKQAAEIYNQSLIELYYEIFIKGKGIANASSVEHYLSDVCYTRAAELFKNAAIASGLRSKIKSNFRLKELKNMKSGLPTTKSDNFPIPLVKQKGGQYTGFEISNHNSDFIIKIPFGRWQVKKEIDKYRPWEKFDFEQVQKSPKPISLLLSTQRRKRNKGWSKDEGTEAEIKKVMNGDYQTSYIEVKRGSKICEKSAWMLNLSIDVPKIDKGVDPSIIGGIAVGVKSPLVCAINNAFSRYSISDNDLFHFNKKMFARRRILLKKNRHKRAGHGAKNKLKPITILTEKSERFRKKLIERWACEIADFFIKNKVGTVQMENLESMKRKEDSYFNIRLRGFWPYAEMQNKIEFKLKQYGIEIRKVAPNNTSKTCSKCGHLNNYFNFEYRKKNKFPHFKCEKCNFKENAAYNAALNISNPKLKSTKEEPNSKKRSLEDNETEIKVSRDTWNTKNMRSLEPPRSKKRIH

SEQ ID NO: 96 - protein, 873 aa, Artificial Sequence
  chemically synthesized
MPKKKRKVSSSSWVDRIEEAEINHEKFHSDPQYLRTEFNLPKMVAEEIRRKCPVCRIRGEQVGGQLKIGPGIWQMDCTHFDGKIILVGIHVESGYIWAQIISQETADCTVKAVLQLLSAHNVTELQTDNGPNFKNQKMEGVLNYMGVKHKFGIPGNPQSQALVENVNHTLKVWIRKFLPETTSLDNALSLAVHSLNFKRRGRIGGMAPYELLAQQESLRIQDYFSAIPQKLQAQWIYYKDQKDKKWKGPMRVEYWGQGSVLLKDEEKGYFLIPRRHIRRVPEPCALPEGDEGGGGSGGGGSGGGGSAKNTITKTLKLRIVRPYNSAEVEKIVADEKNNREKIALEKNKDKVKEACSKHLKVAAYCTTQVERNACLFCKARKLDDKFYQKLRGQFPDAVFWQEISEIFRQLQKQAAEIYNQSLIELYYEIFIKGKGIANASSVEHYLSDVCYTRAAELFKNAAIASGLRSKIKSNFRLKELKNMKSGLPTTKSDNFPIPLVKQKGGQYTGFEISNHNSDFIIKIPFGRWQVKKEIDKYRPWEKFDFEQVQKSPKPISLLLSTQRRKRNKGWSKDEGTEAEIKKVMNGDYQTSYIEVKRGSKICEKSAWMLNLSIDVPKIDKGVDPSIIGGIAVGVKSPLVCAINNAFSRYSISDNDLFHFNKKMFARRRILLKKNRHKRAGHGAKNKLKPITILTEKSERFRKKLIERWACEIADFFIKNKVGTVQMENLESMKRKEDSYFNIRLRGFWPYAEMQNKIEFKLKQYGIEIRKVAPNNTSKTCSKCGHLNNYFNFEYRKKNKFPHFKCEKCNFKENAAYNAALNISNPKLKSTKEEPNSKKRSLEDNETEIKVSRDTWNTKNMRSLEPPRSKKRIH

SEQ ID NO: 97 - protein, 815 aa, Artificial Sequence
  chemically synthesized
MPKKKRKVSSSSWVDRIEEAEINHEKFHSDPQYLRTEFNLPKMVAEEIRRKCPVCRIRGEQVGGQLKIGPGIWQMDCTHFDGKIILVGIHVESGYIWAQIISQETADCTVKAVLQLLSAHNVTELQTDNGPNFKNQKMEGVLNYMGVKHKFGIPGNPQSQALVENVNHTLKVWIRKFLPETTSLDNALSLAVHSLNFKRRGRIGGMAPYELLAQQESLRIQDYFSAIPQKLQAGGGGSGGGGSGGGGSAKNTITKTLKLRIVRPYNSAEVEKIVADEKNNREKIALEKNKDKVKEACSKHLKVAAYCTTQVERNACLFCKARKLDDKFYQKLRGQFPDAVFWQEISEIFRQLQKQAAEIYNQSLIELYYEIFIKGKGIANASSVEHYLSDVCYTRAAELFKNAAIASGLRSKIKSNFRLKELKNMKSGLPTTKSDNFPIPLVKQKGGQYTGFEISNHNSDFIIKIPFGRWQVKKEIDKYRPWEKFDFEQVQKSPKPISLLLSTQRRKRNKGWSKDEGTEAEIKKVMNGDYQTSYIEVKRGSKICEKSAWMLNLSIDVPKIDKGVDPSIIGGIAVGVKSPLVCAINNAFSRYSISDNDLFHFNKKMFARRRILLKKNRHKRAGHGAKNKLKPITILTEKSERFRKKLIERWACEIADFFIKNKVGTVQMENLESMKRKEDSYFNIRLRGFWPYAEMQNKIEFKLKQYGIEIRKVAPNNTSKTCSKCGHLNNYFNFEYRKKNKFPHFKCEKCNFKENAAYNAALNISNPKLKSTKEEPNSKKRSLEDNETEIKVSRDTWNTKNMRSLEPPRSKKRIH

SEQ ID NO: 98 - protein, 873 aa, Artificial Sequence
  chemically synthesized
MPKKKRKVSSTCFLENIPSATEDHERWHTSPDILVRQFHLPKRIAKEIVARCQECKRTTTSPVRGTNPRGRFLWQMDNTHWNKTIIWVAVETNSGLVEAQVIPEETALQVALCILQLIQRYTVLHLHSDNGPCFTAHRIENLCKYLGITKTTGIPYNPQSQGVVERAHRDLKDRLAAYQGDCETVEAALSLALVSLNKKRGGIGGHTPYEIYLESEHTKYQDQLEQQFSKQKIEKWCYVRNRRKEWKGPYKVLWDGDGAAVIEEEGKTALYPHRHMRFIPPPDSDIQDGSSGGGGSGGGGSGGGGSAKNTITKTLKLRIVRPYNSAEVEKIVADEKNNREKIALEKNKDKVKEACSKHLKVAAYCTTQVERNACLFCKARKLDDKFYQKLRGQFPDAVFWQEISEIFRQLQKQAAEIYNQSLIELYYEIFIKGKGIANASSVEHYLSDVCYTRAAELFKNAAIASGLRSKIKSNFRLKELKNMKSGLPTTKSDNFPIPLVKQKGGQYTGFEISNHNSDFIIKIPFGRWQVKKEIDKYRPWEKFDFEQVQKSPKPISLLLSTQRRKRNKGWSKDEGTEAEIKKVMNGDYQTSYIEVKRGSKICEKSAWMLNLSIDVPKIDKGVDPSIIGGIAVGVKSPLVCAINNAFSRYSISDNDLFHFNKKMFARRRILLKKNRHKRAGHGAKNKLKPITILTEKSERFRKKLIERWACEIADFFIKNKVGTVQMENLESMKRKEDSYFNIRLRGFWPYAEMQNKIEFKLKQYGIEIRKVAPNNTSKTCSKCGHLNNYFNFEYRKKNKFPHFKCEKCNFKENAAYNAALNISNPKLKSTKEEPNSKKRSLEDNETEIKVSRDTWNTKNMRSLEPPRSKKRIH

SEQ ID NO: 99 - protein, 816 aa, Artificial Sequence
  chemically synthesized
MPKKKRKVSSTCFLENIPSATEDHERWHTSPDILVRQFHLPKRIAKEIVARCQECKRTTTSPVRGTNPRGRFLWQMDNTHWNKTIIWVAVETNSGLVEAQVIPEETALQVALCILQLIQRYTVLHLHSDNGPCFTAHRIENLCKYLGITKTTGIPYNPQSQGVVERAHRDLKDRLAAYQGDCETVEAALSLALVSLNKKRGGIGGHTPYEIYLESEHTKYQDQLEQQFSKQKIEGGGGSGGGGSGGGGSAKNTITKTLKLRIVRPYNSAEVEKIVADEKNNREKIALEKNKDKVKEACSKHLKVAAYCTTQVERNACLFCKARKLDDKFYQKLRGQFPDAVFWQEISEIFRQLQKQAAEIYNQSLIELYYEIFIKGKGIANASSVEHYLSDVCYTRAAELFKNAAIASGLRSKIKSNFRLKELKNMKSGLPTTKSDNFPIPLVKQKGGQYTGFEISNHNSDFIIKIPFGRWQVKKEIDKYRPWEKFDFEQVQKSPKPISLLLSTQRRKRNKGWSKDEGTEAEIKKVMNGDYQTSYIEVKRGSKICEKSAWMLNLSIDVPKIDKGVDPSIIGGIAVGVKSPLVCAINNAFSRYSISDNDLFHFNKKMFARRRILLKKNRHKRAGHGAKNKLKPITILTEKSERFRKKLIERWACEIADFFIKNKVGTVQMENLESMKRKEDSYFNIRLRGFWPYAEMQNKIEFKLKQYGIEIRKVAPNNTSKTCSKCGHLNNYFNFEYRKKNKFPHFKCEKCNFKENAAYNAALNISNPKLKSTKEEPNSKKRSLEDNETEIKVSRDTWNTKNMRSLEPPRSKKRIH

SEQ ID NO: 100 - protein, 859 aa, Artificial Sequence
  chemically synthesized
MPKKKRKVSSNVHTSESTRKYPYPFIHRMLAHANAQTIRYSLKNNTITYFNESDVDWSSAIDYQCPDCLIGKSTKHRHIKGSRLKYQNSYEPFQYLHTDIFGPVHNLPKSAPSYFISFTDETTKFRWVYPLHDRREDSILDVFTTILAFIKNQFQASVLVIQMDRGSEYTNRTLHKFLEKNGITPCYTTTADSRAHGVAERLNRTLLDDCRTQLQCSGLPNHLWFSAIEFSTIVRNSLASPKSKKSARQHAGLAGLDISTLLPFGQPVIVNDHNPNSGGGGSGGGGSGGGGSAKNTITKTLKLRIVRPYNSAEVEKIVADEKNNREKIALEKNKDKVKEACSKHLKVAAYCTTQVERNACLFCKARKLDDKFYQKLRGQFPDAVFWQEISEIFRQLQKQAAEIYNQSLIELYYEIFIKGKGIANASSVEHYLSDVCYTRAAELFKNAAIASGLRSKIKSNFRLKELKNMKSGLPTTKSDNFPIPLVKQKGGQYTGFEISNHNSDFIIKIPFGRWQVKKEIDKYRPWEKFDFEQVQKSPKPISLLLSTQRRKRNKGWSKDEGTEAEIKKVMNGDYQTSYIEVKRGSKICEKSAWMLNLSIDVPKIDKGVDPSIIGGIAVGVKSPLVCAINNAFSRYSISDNDLFHFNKKMFARRRILLKKNRHKRAGHGAKNKLKPITILTEKSERFRKKLIERWACEIADFFIKNKVGTVQMENLESMKRKEDSYFNIRLRGFWPYAEMQNKIEFKLKQYGIEIRKVAPNNTSKTCSKCGHLNNYFNFEYRKKNKFPHFKCEKCNFKENAAYNAALNISNPKLKSTKEEPNSKKRSLEDNETEIKVSRDTWNTKNMRSLEPPRSKKRIH

SEQ ID NO: 101 - protein, 879 aa, Artificial Sequence
  chemically synthesized
MPKKKRKVSSKYVFIEKHQAEFSIKAMCRVLRVARSGWYTWCQRRTRISTRQQFRQHCDSVVLAAFTRSKQRYGAPRLTDELRAQGYPFNVKTVAASLRRQGLRAKASRKFSPVSYRAHGLPVSENLLEQDFYASGPNQKWAGDITYLRTDEGWLYLAVVIDLWSRAVIGWSMSPRMTAQLACDALQMALWRRKRPRNVIVHTDRGGQYCSADYQAQLKRHNLRGSMSAKGCCYDNACVESFFHSLKVECIHGEHFISREIMRATVFNYIECDYNRWRRHSWCGGLSPEQFENKNLAGGGGSGGGGSGGGGSAKNTITKTLKLRIVRPYNSAEVEKIVADEKNNREKIALEKNKDKVKEACSKHLKVAAYCTTQVERNACLFCKARKLDDKFYQKLRGQFPDAVFWQEISEIFRQLQKQAAEIYNQSLIELYYEIFIKGKGIANASSVEHYLSDVCYTRAAELFKNAAIASGLRSKIKSNFRLKELKNMKSGLPTTKSDNFPIPLVKQKGGQYTGFEISNHNSDFIIKIPFGRWQVKKEIDKYRPWEKFDFEQVQKSPKPISLLLSTQRRKRNKGWSKDEGTEAEIKKVMNGDYQTSYIEVKRGSKICEKSAWMLNLSIDVPKIDKGVDPSIIGGIAVGVKSPLVCAINNAFSRYSISDNDLFHFNKKMFARRRILLKKNRHKRAGHGAKNKLKPITILTEKSERFRKKLIERWACEIADFFIKNKVGTVQMENLESMKRKEDSYFNIRLRGFWPYAEMQNKIEFKLKQYGIEIRKVAPNNTSKTCSKCGHLNNYFNFEYRKKNKFPHFKCEKCNFKENAAYNAALNISNPKLKSTKEEPNSKKRSLEDNETEIKVSRDTWNTKNMRSLEPPRSKKRIH

SEQ ID NO: 102 - protein, 767 aa, Artificial Sequence
  chemically synthesized
MPKKKRKVSSVSENLLEQDFYASGPNQKWAGDITYLRTDEGWLYLAVVIDLWSRAVIGWSMSPRMTAQLACDALQMALWRRKRPRNVIVHTDRGGQYCSADYQAQLKRHNLRGSMSAKGCCYDNACVESFFHSLKVECIHGEHFISREIMRATVFNYIECDYNRWRRHSWCGGLSPEQFENKNLAGGGGSGGGGSGGGGSAKNTITKTLKLRIVRPYNSAEVEKIVADEKNNREKIALEKNKDKVKEACSKHLKVAAYCTTQVERNACLFCKARKLDDKFYQKLRGQFPDAVFWQEISEIFRQLQKQAAEIYNQSLIELYYEIFIKGKGIANASSVEHYLSDVCYTRAAELFKNAAIASGLRSKIKSNFRLKELKNMKSGLPTTKSDNFPIPLVKQKGGQYTGFEISNHNSDFIIKIPFGRWQVKKEIDKYRPWEKFDFEQVQKSPKPISLLLSTQRRKRNKGWSKDEGTEAEIKKVMNGDYQTSYIEVKRGSKICEKSAWMLNLSIDVPKIDKGVDPSIIGGIAVGVKSPLVCAINNAFSRYSISDNDLFHFNKKMFARRRILLKKNRHKRAGHGAKNKLKPITILTEKSERFRKKLIERWACEIADFFIKNKVGTVQMENLESMKRKEDSYFNIRLRGFWPYAEMQNKIEFKLKQYGIEIRKVAPNNTSKTCSKCGHLNNYFNFEYRKKNKFPHFKCEKCNFKENAAYNAALNISNPKLKSTKEEPNSKKRSLEDNETEIKVSRDTWNTKNMRSLEPPRSKKRIH

SEQ ID NO: 103 - protein, 1719 aa, Artificial Sequence
  chemically synthesized
MPKKKRKVSSFLDGIDKAQDEHEKYHSNWRAMASDFNLPPVVAKEIVASCDKCQLKGEAMHGQVDCSPGIWQLDCTHLEGKVILVAVHVASGYIEAEVIPAETGQETAYFLLKLAGRWPVKTIHTDNGSNFTGATVRAACWWAGIKQEFGIPYNPQSQGVVESMNKELKKIIGQVRDQAEHLKTAVQMAVFIHNFKRKGGIGGYSAGERIVDIIATDIQTKELQKQITKIQNFRVYYRDSRNPLWKGPAKLLWKGEGAVVIQDNSDIKVVPRRKAKIIRDYGKQMAGDDCVASRQDEDGGGGSGGGGSGGGGSDKKYSIGLAIGTNSVGWAVITDEYKVPSKKFKVLGNTDRHSIKKNLIGALLFDSGETAEATRLKRTARRRYTRRKNRICYLQEIFSNEMAKVDDSFFHRLEESFLVEEDKKHERHPIFGNIVDEVAYHEKYPTIYHLRKKLVDSTDKADLRLIYLALAHMIKFRGHFLIEGDLNPDNSDVDKLFIQLVQTYNQLFEENPINASGVDAKAILSARLSKSRRLENLIAQLPGEKKNGLFGNLIALSLGLTPNFKSNFDLAEDAKLQLSKDTYDDDLDNLLAQIGDQYADLFLAAKNLSDAILLSDILRVNTEITKAPLSASMIKRYDEHHQDLTLLKALVRQQLPEKYKEIFFDQSKNGYAGYIDGGASQEEFYKFIKPILEKMDGTEELLVKLNREDLLRKQRTFDNGSIPHQIHLGELHAILRRQEDFYPFLKDNREKIEKILTFRIPYYVGPLARGNSRFAWMTRKSEETITPWNFEEVVDKGASAQSFIERMTNFDKNLPNEKVLPKHSLLYEYFTVYNELTKVKYVTEGMRKPAFLSGEQKKAIVDLLFKTNRKVTVKQLKEDYFKKIECFDSVEISGVEDRFNASLGTYHDLLKIIKDKDFLDNEENEDILEDIVLTLTLFEDREMIEERLKTYAHLFDDKVMKQLKRRRYTGWGRLSRKLINGIRDKQSGKTILDFLKSDGFANRNFMQLIHDDSLTFKEDIQKAQVSGQGDSLHEHIANLAGSPAIKKGILQTVKVVDELVKVMGRHKPENIVIEMARENQTTQKGQKNSRERMKRIEEGIKELGSQILKEHPVENTQLQNEKLYLYYLQNGRDMYVDQELDINRLSDYDVDAIVPQSFLKDDSIDNKVLTRSDKNRGKSDNVPSEEVVKKMKNYWRQLLNAKLITQRKFDNLTKAERGGLSELDKAGFIKRQLVETRQITKHVAQILDSRMNTKYDENDKLIREVKVITLKSKLVSDFRKDFQFYKVREINNYHHAHDAYLNAVVGTALIKKYPKLESEFVYGDYKVYDVRKMIAKSEQEIGKATAKYFFYSNIMNFFKTEITLANGEIRKRPLIETNGETGEIVWDKGRDFATVRKVLSMPQVNIVKKTEVQTGGFSKESILPKRNSDKLIARKKDWDPKKYGGFDSPTVAYSVLVVAKVEKGKSKKLKSVKELLGITIMERSSFEKNPIDFLEAKGYKEVKKDLIIKLPKYSLFELENGRKRMLASAGELQKGNELALPSKYVNFLYLASHYEKLKGSPEDNEQKQLFVEQHKHYLDEIIEQISEFSKRVILADANLDKVLSAYNKHRDKPIREQAENIIHLFTLTNLGAPAAFKYFDTTIDRKRYTSTKEVLDATLIHQSITGLYETRIDLSQLGGDNSKKRSLEDNETEIKVSRDTWNTKNMRSLEPPRSKKRIH

SEQ ID NO: 104 - protein, 1653 aa, Artificial Sequence
  chemically synthesized
MPKKKRKVSSFLDGIDKAQDEHEKYHSNWRAMASDFNLPPVVAKEIVASCDKCQLKGEAMHGQVDCSPGIWQLDCTHLEGKVILVAVHVASGYIEAEVIPAETGQETAYFLLKLAGRWPVKTIHTDNGSNFTGATVRAACWWAGIKQEFGIPYNPQSQGVVESMNKELKKIIGQVRDQAEHLKTAVQMAVFIHNFKRKGGIGGYSAGERIVDIIATDIQTKELQKQITKIQNGGGGSGGGGSGGGGSDKKYSIGLAIGTNSVGWAVITDEYKVPSKKFKVLGNTDRHSIKKNLIGALLFDSGETAEATRLKRTARRRYTRRKNRICYLQEIFSNEMAKVDDSFFHRLEESFLVEEDKKHERHPIFGNIVDEVAYHEKYPTIYHLRKKLVDSTDKADLRLIYLALAHMIKFRGHFLIEGDLNPDNSDVDKLFIQLVQTYNQLFEENPINASGVDAKAILSARLSKSRRLENLIAQLPGEKKNGLFGNLIALSLGLTPNFKSNFDLAEDAKLQLSKDTYDDDLDNLLAQIGDQYADLFLAAKNLSDAILLSDILRVNTEITKAPLSASMIKRYDEHHQDLTLLKALVRQQLPEKYKEIFFDQSKNGYAGYIDGGASQEEFYKFIKPILEKMDGTEELLVKLNREDLLRKQRTFDNGSIPHQIHLGELHAILRRQEDFYPFLKDNREKIEKILTFRIPYYVGPLARGNSRFAWMTRKSEETITPWNFEEVVDKGASAQSFIERMTNFDKNLPNEKVLPKHSLLYEYFTVYNELTKVKYVTEGMRKPAFLSGEQKKAIVDLLFKTNRKVTVKQLKEDYFKKIECFDSVEISGVEDRFNASLGTYHDLLKIIKDKDFLDNEENEDILEDIVLTLTLFEDREMIEERLKTYAHLFDDKVMKQLKRRRYTGWGRLSRKLINGIRDKQSGKTILDFLKSDGFANRNFMQLIHDDSLTFKEDIQKAQVSGQGDSLHEHIANLAGSPAIKKGILQTVKVVDELVKVMGRHKPENIVIEMARENQTTQKGQKNSRERMKRIEEGIKELGSQILKEHPVENTQLQNEKLYLYYLQNGRDMYVDQELDINRLSDYDVDAIVPQSFLKDDSIDNKVLTRSDKNRGKSDNVPSEEVVKKMKNYWRQLLNAKLITQRKFDNLTKAERGGLSELDKAGFIKRQLVETRQITKHVAQILDSRMNTKYDENDKLIREVKVITLKSKLVSDFRKDFQFYKVREINNYHHAHDAYLNAVVGTALIKKYPKLESEFVYGDYKVYDVRKMIAKSEQEIGKATAKYFFYSNIMNFFKTEITLANGEIRKRPLIETNGETGEIVWDKGRDFATVRKVLSMPQVNIVKKTEVQTGGFSKESILPKRNSDKLIARKKDWDPKKYGGFDSPTVAYSVLVVAKVEKGKSKKLKSVKELLGITIMERSSFEKNPIDFLEAKGYKEVKKDLIIKLPKYSLFELENGRKRMLASAGELQKGNELALPSKYVNFLYLASHYEKLKGSPEDNEQKQLFVEQHKHYLDEIIEQISEFSKRVILADANLDKVLSAYNKHRDKPIREQAENIIHLFTLTNLGAPAAFKYFDTTIDRKRYTSTKEVLDATLIHQSITGLYETRIDLSQLGGDNSKKRSLEDNETEIKVSRDTWNTKNMRSLEPPRSKKRIH

SEQ ID NO: 105 - protein, 1890 aa, Artificial Sequence
  chemically synthesized
MPKKKRKVSSFLDGIDKAQDEHEKYHSNWRAMASDFNLPPVVAKEIVASCDKCQLKGEAMHGQVDCSPGIWQLDCTHLEGKVILVAVHVASGYIEAEVIPAETGQETAYFLLKLAGRWPVKTIHTDNGSNFTGATVRAACWWAGIKQEFGIPYNPQSQGVVESMNKELKKIIGQVRDQAEHLKTAVQMAVFIHNFKRKGGIGGYSAGERIVDIIATDIQTKELQKQITKIQNGGGGSGGGGSGGGGSFLDGIDKAQDEHEKYHSNWRAMASDFNLPPVVAKEIVASCDKCQLKGEAMHGQVDCSPGIWQLDCTHLEGKVILVAVHVASGYIEAEVIPAETGQETAYFLLKLAGRWPVKTIHTDNGSNFTGATVRAACWWAGIKQEFGIPYNPQSQGVVESMNKELKKIIGQVRDQAEHLKTAVQMAVFIHNFKRKGGIGGYSAGERIVDIIATDIQTKELQKQITKIQNGGGGSGGGGSGGGGSDKKYSIGLAIGTNSVGWAVITDEYKVPSKKFKVLGNTDRHSIKKNLIGALLFDSGETAEATRLKRTARRRYTRRKNRICYLQEIFSNEMAKVDDSFFHRLEESFLVEEDKKHERHPIFGNIVDEVAYHEKYPTIYHLRKKLVDSTDKADLRLIYLALAHMIKFRGHFLIEGDLNPDNSDVDKLFIQLVQTYNQLFEENPINASGVDAKAILSARLSKSRRLENLIAQLPGEKKNGLFGNLIALSLGLTPNFKSNFDLAEDAKLQLSKDTYDDDLDNLLAQIGDQYADLFLAAKNLSDAILLSDILRVNTEITKAPLSASMIKRYDEHHQDLTLLKALVRQQLPEKYKEIFFDQSKNGYAGYIDGGASQEEFYKFIKPILEKMDGTEELLVKLNREDLLRKQRTFDNGSIPHQIHLGELHAILRRQEDFYPFLKDNREKIEKILTFRIPYYVGPLARGNSRFAWMTRKSEETITPWNFEEVVDKGASAQSFIERMTNFDKNLPNEKVLPKHSLLYEYFTVYNELTKVKYVTEGMRKPAFLSGEQKKAIVDLLFKTNRKVTVKQLKEDYFKKIECFDSVEISGVEDRFNASLGTYHDLLKIIKDKDFLDNEENEDILEDIVLTLTLFEDREMIEERLKTYAHLFDDKVMKQLKRRRYTGWGRLSRKLINGIRDKQSGKTILDFLKSDGFANRNFMQLIHDDSLTFKEDIQKAQVSGQGDSLHEHIANLAGSPAIKKGILQTVKVVDELVKVMGRHKPENIVIEMARENQTTQKGQKNSRERMKRIEEGIKELGSQILKEHPVENTQLQNEKLYLYYLQNGRDMYVDQELDINRLSDYDVDAIVPQSFLKDDSIDNKVLTRSDKNRGKSDNVPSEEVVKKMKNYWRQLLNAKLITQRKFDNLTKAERGGLSELDKAGFIKRQLVETRQITKHVAQILDSRMNTKYDENDKLIREVKVITLKSKLVSDFRKDFQFYKVREINNYHHAHDAYLNAVVGTALIKKYPKLESEFVYGDYKVYDVRKMIAKSEQEIGKATAKYFFYSNIMNFFKTEITLANGEIRKRPLIETNGETGEIVWDKGRDFATVRKVLSMPQVNIVKKTEVQTGGFSKESILPKRNSDKLIARKKDWDPKKYGGFDSPTVAYSVLVVAKVEKGKSKKLKSVKELLGITIMERSSFEKNPIDFLEAKGYKEVKKDLIIKLPKYSLFELENGRKRMLASAGELQKGNELALPSKYVNFLYLASHYEKLKGSPEDNEQKQLFVEQHKHYLDEIIEQISEFSKRVILADANLDKVLSAYNKHRDKPIREQAENIIHLFTLTNLGAPAAFKYFDTTIDRKRYTSTKEVLDATLIHQSITGLYETRIDLSQLGGDNSKKRSLEDNETEIKVSRDTWNTKNMRSLEPPRSKKRIH

SEQ ID NO: 106 - protein, 1719 aa, Artificial Sequence
  chemically synthesized
MPKKKRKVSSFLDGIDKAQDEHEKYHSNWRAMASDFNLPPVVAKEIVASCDKCQLKGEAMHGQVDCSPGIWQLDCTHLEGKVILVAVHVASGYIGAEVIPAETGQETAYFLLKLAGRWPVKTIHTDNGSNFTGATVRAACWWAGIKQEFGIPYNPQSQGVVESMNKELKKIIGQVRDQAEHLKTAVQMAVFIHNFKRKGGIGGYSAGERIVDIIATDIQTKELQKQITKIQNFRVYYRDSRNPLWKGPAKLLWKGEGAVVIQDNSDIKVVPRRKAKIIRDYGKQMAGDDCVASRQDEDGGGGSGGGGSGGGGSDKKYSIGLAIGTNSVGWAVITDEYKVPSKKFKVLGNTDRHSIKKNLIGALLFDSGETAEATRLKRTARRRYTRRKNRICYLQEIFSNEMAKVDDSFFHRLEESFLVEEDKKHERHPIFGNIVDEVAYHEKYPTIYHLRKKLVDSTDKADLRLIYLALAHMIKFRGHFLIEGDLNPDNSDVDKLFIQLVQTYNQLFEENPINASGVDAKAILSARLSKSRRLENLIAQLPGEKKNGLFGNLIALSLGLTPNFKSNFDLAEDAKLQLSKDTYDDDLDNLLAQIGDQYADLFLAAKNLSDAILLSDILRVNTEITKAPLSASMIKRYDEHHQDLTLLKALVRQQLPEKYKEIFFDQSKNGYAGYIDGGASQEEFYKFIKPILEKMDGTEELLVKLNREDLLRKQRTFDNGSIPHQIHLGELHAILRRQEDFYPFLKDNREKIEKILTFRIPYYVGPLARGNSRFAWMTRKSEETITPWNFEEVVDKGASAQSFIERMTNFDKNLPNEKVLPKHSLLYEYFTVYNELTKVKYVTEGMRKPAFLSGEQKKAIVDLLFKTNRKVTVKQLKEDYFKKIECFDSVEISGVEDRFNASLGTYHDLLKIIKDKDFLDNEENEDILEDIVLTLTLFEDREMIEERLKTYAHLFDDKVMKQLKRRRYTGWGRLSRKLINGIRDKQSGKTILDFLKSDGFANRNFMQLIHDDSLTFKEDIQKAQVSGQGDSLHEHIANLAGSPAIKKGILQTVKVVDELVKVMGRHKPENIVIEMARENQTTQKGQKNSRERMKRIEEGIKELGSQILKEHPVENTQLQNEKLYLYYLQNGRDMYVDQELDINRLSDYDVDAIVPQSFLKDDSIDNKVLTRSDKNRGKSDNVPSEEVVKKMKNYWRQLLNAKLITQRKFDNLTKAERGGLSELDKAGFIKRQLVETRQITKHVAQILDSRMNTKYDENDKLIREVKVITLKSKLVSDFRKDFQFYKVREINNYHHAHDAYLNAVVGTALIKKYPKLESEFVYGDYKVYDVRKMIAKSEQEIGKATAKYFFYSNIMNFFKTEITLANGEIRKRPLIETNGETGEIVWDKGRDFATVRKVLSMPQVNIVKKTEVQTGGFSKESILPKRNSDKLIARKKDWDPKKYGGFDSPTVAYSVLVVAKVEKGKSKKLKSVKELLGITIMERSSFEKNPIDFLEAKGYKEVKKDLIIKLPKYSLFELENGRKRMLASAGELQKGNELALPSKYVNFLYLASHYEKLKGSPEDNEQKQLFVEQHKHYLDEIIEQISEFSKRVILADANLDKVLSAYNKHRDKPIREQAENIIHLFTLTNLGAPAAFKYFDTTIDRKRYTSTKEVLDATLIHQSITGLYETRIDLSQLGGDNSKKRSLEDNETEIKVSRDTWNTKNMRSLEPPRSKKRIH

SEQ ID NO: 107 - protein, 1653 aa, Artificial Sequence
  chemically synthesized
MPKKKRKVSSFLDGIDKAQDEHEKYHSNWRAMASDFNLPPVVAKEIVASCDKCQLKGEAMHGQVDCSPGIWQLDCTHLEGKVILVAVHVASGYIGAEVIPAETGQETAYFLLKLAGRWPVKTIHTDNGSNFTGATVRAACWWAGIKQEFGIPYNPQSQGVVESMNKELKKIIGQVRDQAEHLKTAVQMAVFIHNFKRKGGIGGYSAGERIVDIIATDIQTKELQKQITKIQNGGGGSGGGGSGGGGSDKKYSIGLAIGTNSVGWAVITDEYKVPSKKFKVLGNTDRHSIKKNLIGALLFDSGETAEATRLKRTARRRYTRRKNRICYLQEIFSNEMAKVDDSFFHRLEESFLVEEDKKHERHPIFGNIVDEVAYHEKYPTIYHLRKKLVDSTDKADLRLIYLALAHMIKFRGHFLIEGDLNPDNSDVDKLFIQLVQTYNQLFEENPINASGVDAKAILSARLSKSRRLENLIAQLPGEKKNGLFGNLIALSLGLTPNFKSNFDLAEDAKLQLSKDTYDDDLDNLLAQIGDQYADLFLAAKNLSDAILLSDILRVNTEITKAPLSASMIKRYDEHHQDLTLLKALVRQQLPEKYKEIFFDQSKNGYAGYIDGGASQEEFYKFIKPILEKMDGTEELLVKLNREDLLRKQRTFDNGSIPHQIHLGELHAILRRQEDFYPFLKDNREKIEKILTFRIPYYVGPLARGNSRFAWMTRKSEETITPWNFEEVVDKGASAQSFIERMTNFDKNLPNEKVLPKHSLLYEYFTVYNELTKVKYVTEGMRKPAFLSGEQKKAIVDLLFKTNRKVTVKQLKEDYFKKIECFDSVEISGVEDRFNASLGTYHDLLKIIKDKDFLDNEENEDILEDIVLTLTLFEDREMIEERLKTYAHLFDDKVMKQLKRRRYTGWGRLSRKLINGIRDKQSGKTILDFLKSDGFANRNFMQLIHDDSLTFKEDIQKAQVSGQGDSLHEHIANLAGSPAIKKGILQTVKVVDELVKVMGRHKPENIVIEMARENQTTQKGQKNSRERMKRIEEGIKELGSQILKEHPVENTQLQNEKLYLYYLQNGRDMYVDQELDINRLSDYDVDAIVPQSFLKDDSIDNKVLTRSDKNRGKSDNVPSEEVVKKMKNYWRQLLNAKLITQRKFDNLTKAERGGLSELDKAGFIKRQLVETRQITKHVAQILDSRMNTKYDENDKLIREVKVITLKSKLVSDFRKDFQFYKVREINNYHHAHDAYLNAVVGTALIKKYPKLESEFVYGDYKVYDVRKMIAKSEQEIGKATAKYFFYSNIMNFFKTEITLANGEIRKRPLIETNGETGEIVWDKGRDFATVRKVLSMPQVNIVKKTEVQTGGFSKESILPKRNSDKLIARKKDWDPKKYGGFDSPTVAYSVLVVAKVEKGKSKKLKSVKELLGITIMERSSFEKNPIDFLEAKGYKEVKKDLIIKLPKYSLFELENGRKRMLASAGELQKGNELALPSKYVNFLYLASHYEKLKGSPEDNEQKQLFVEQHKHYLDEIIEQISEFSKRVILADANLDKVLSAYNKHRDKPIREQAENIIHLFTLTNLGAPAAFKYFDTTIDRKRYTSTKEVLDATLIHQSITGLYETRIDLSQLGGDNSKKRSLEDNETEIKVSRDTWNTKNMRSLEPPRSKKRIH

SEQ ID NO: 108 - protein, 1719 aa, Artificial Sequence
  chemically synthesized
MPKKKRKVSSFLDGIDKAQDEHEKYHSNWRAMASDFNLPPVVAKEIVASCDKCQLKGEAMHGQVDCSPGIWQLDCTHLEGKVILVAVHVASGYIFAEVIPAETGQETAYFLLKLAGRWPVKTIHTDNGSNFTGATVRAACWWAGIKQEFGIPYNPQSQGVVESMNKELKKIIGQVRDQAEHLKTAVQMAVFIHNFKRKGGIGGYSAGERIVDIIATDIQTKELQKQITKIQNFRVYYRDSRNPLWKGPAKLLWKGEGAVVIQDNSDIKVVPRRKAKIIRDYGKQMAGDDCVASRQDEDGGGGSGGGGSGGGGSDKKYSIGLAIGTNSVGWAVITDEYKVPSKKFKVLGNTDRHSIKKNLIGALLFDSGETAEATRLKRTARRRYTRRKNRICYLQEIFSNEMAKVDDSFFHRLEESFLVEEDKKHERHPIFGNIVDEVAYHEKYPTIYHLRKKLVDSTDKADLRLIYLALAHMIKFRGHFLIEGDLNPDNSDVDKLFIQLVQTYNQLFEENPINASGVDAKAILSARLSKSRRLENLIAQLPGEKKNGLFGNLIALSLGLTPNFKSNFDLAEDAKLQLSKDTYDDDLDNLLAQIGDQYADLFLAAKNLSDAILLSDILRVNTEITKAPLSASMIKRYDEHHQDLTLLKALVRQQLPEKYKEIFFDQSKNGYAGYIDGGASQEEFYKFIKPILEKMDGTEELLVKLNREDLLRKQRTFDNGSIPHQIHLGELHAILRRQEDFYPFLKDNREKIEKILTFRIPYYVGPLARGNSRFAWMTRKSEETITPWNFEEVVDKGASAQSFIERMTNFDKNLPNEKVLPKHSLLYEYFTVYNELTKVKYVTEGMRKPAFLSGEQKKAIVDLLFKTNRKVTVKQLKEDYFKKIECFDSVEISGVEDRFNASLGTYHDLLKIIKDKDFLDNEENEDILEDIVLTLTLFEDREMIEERLKTYAHLFDDKVMKQLKRRRYTGWGRLSRKLINGIRDKQSGKTILDFLKSDGFANRNFMQLIHDDSLTFKEDIQKAQVSGQGDSLHEHIANLAGSPAIKKGILQTVKVVDELVKVMGRHKPENIVIEMARENQTTQKGQKNSRERMKRIEEGIKELGSQILKEHPVENTQLQNEKLYLYYLQNGRDMYVDQELDINRLSDYDVDAIVPQSFLKDDSIDNKVLTRSDKNRGKSDNVPSEEVVKKMKNYWRQLLNAKLITQRKFDNLTKAERGGLSELDKAGFIKRQLVETRQITKHVAQILDSRMNTKYDENDKLIREVKVITLKSKLVSDFRKDFQFYKVREINNYHHAHDAYLNAVVGTALIKKYPKLESEFVYGDYKVYDVRKMIAKSEQEIGKATAKYFFYSNIMNFFKTEITLANGEIRKRPLIETNGETGEIVWDKGRDFATVRKVLSMPQVNIVKKTEVQTGGFSKESILPKRNSDKLIARKKDWDPKKYGGFDSPTVAYSVLVVAKVEKGKSKKLKSVKELLGITIMERSSFEKNPIDFLEAKGYKEVKKDLIIKLPKYSLFELENGRKRMLASAGELQKGNELALPSKYVNFLYLASHYEKLKGSPEDNEQKQLFVEQHKHYLDEIIEQISEFSKRVILADANLDKVLSAYNKHRDKPIREQAENIIHLFTLTNLGAPAAFKYFDTTIDRKRYTSTKEVLDATLIHQSITGLYETRIDLSQLGGDNSKKRSLEDNETEIKVSRDTWNTKNMRSLEPPRSKKRIH

SEQ ID NO: 109 - protein, 1652 aa, Artificial Sequence
  chemically synthesized
MPKKKRKVSSFLDGIDKAQDEHEKYHSNWRAMASDFNLPPVVAKEIVASCDKCQLKGEAMHGQVDCSPGIWQLDCTHLEGKVILVAVHVASGYIFAEVIPAETGQETAYFLLKLAGRWPVKTIHTDNGSNFTGATVRAACWWAGIKQEFGIPYNPQSQGVVESMNKELKKIIGQVRDQAEHLKTAVQMAVFIHNFKRKGGIGGYSAGERIVDIIATDIQTKELQKQTKIQNGGGGSGGGGSGGGGSDKKYSIGLAIGTNSVGWAVITDEYKVPSKKFKVLGNTDRHSIKKNLIGALLFDSGETAEATRLKRTARRRYTRRKNRICYLQEIFSNEMAKVDDSFFHRLEESFLVEEDKKHERHPIFGNIVDEVAYHEKYPTIYHLRKKLVDSTDKADLRLIYLALAHMIKFRGHFLIEGDLNPDNSDVDKLFIQLVQTYNQLFEENPINASGVDAKAILSARLSKSRRLENLIAQLPGEKKNGLFGNLIALSLGLTPNFKSNFDLAEDAKLQLSKDTYDDDLDNLLAQIGDQYADLFLAAKNLSDAILLSDILRVNTEITKAPLSASMIKRYDEHHQDLTLLKALVRQQLPEKYKEIFFDQSKNGYAGYIDGGASQEEFYKFIKPILEKMDGTEELLVKLNREDLLRKQRTFDNGSIPHQIHLGELHAILRRQEDFYPFLKDNREKIEKILTFRIPYYVGPLARGNSRFAWMTRKSEETITPWNFEEVVDKGASAQSFIERMTNFDKNLPNEKVLPKHSLLYEYFTVYNELTKVKYVTEGMRKPAFLSGEQKKAIVDLLFKTNRKVTVKQLKEDYFKKIECFDSVEISGVEDRFNASLGTYHDLLKIIKDKDFLDNEENEDILEDIVLTLTLFEDREMIEERLKTYAHLFDDKVMKQLKRRRYTGWGRLSRKLINGIRDKQSGKTILDFLKSDGFANRNFMQLIHDDSLTFKEDIQKAQVSGQGDSLHEHIANLAGSPAIKKGILQTVKVVDELVKVMGRHKPENIVIEMARENQTTQKGQKNSRERMKRIEEGIKELGSQILKEHPVENTQLQNEKLYLYYLQNGRDMYVDQELDINRLSDYDVDAIVPQSFLKDDSIDNKVLTRSDKNRGKSDNVPSEEVVKKMKNYWRQLLNAKLITQRKFDNLTKAERGGLSELDKAGFIKRQLVETRQITKHVAQILDSRMNTKYDENDKLIREVKVITLKSKLVSDFRKDFQFYKVREINNYHHAHDAYLNAVVGTALIKKYPKLESEFVYGDYKVYDVRKMIAKSEQEIGKATAKYFFYSNIMNFFKTEITLANGEIRKRPLIETNGETGEIVWDKGRDFATVRKVLSMPQVNIVKKTEVQTGGFSKESILPKRNSDKLIARKKDWDPKKYGGFDSPTVAYSVLVVAKVEKGKSKKLKSVKELLGITIMERSSFEKNPIDFLEAKGYKEVKKDLIIKLPKYSLFELENGRKRMLASAGELQKGNELALPSKYVNFLYLASHYEKLKGSPEDNEQKQLFVEQHKHYLDEIIEQISEFSKRVILADANLDKVLSAYNKHRDKPIREQAENIIHLFTLTNLGAPAAFKYFDTTIDRKRYTSTKEVLDATLIHQSITGLYETRIDLSQLGGDNSKKRSLEDNETEIKVSRDTWNTKNMRSLEPPRSKKRIH

SEQ ID NO: 110 - protein, 1719 aa, Artificial Sequence
  chemically synthesized
MPKKKRKVSSFLDGIDKAQDEHEKYHSNWRAMASDFNLPPVVAKEIVASCDKCQLKGEAMHGQVDCSPGIWQLDCTHLEGKVILVAVHVASGYIEAEVIPAETGQETAYFLLKLAGRWPVKTIHTNNGSNFTGATVRAACWWAGIKQEFGIPYNPQSQGVVESMNKELKKIIGQVRDQAEHLKTAVQMAVFIHNFKRKGGIGGYSAGERIVDIIATDIQTKELQKQITKIQNFRVYYRDSRNPLWKGPAKLLWKGEGAVVIQDNSDIKVVPRRKAKIIRDYGKQMAGDDCVASRQDEDGGGGSGGGGSGGGGSDKKYSIGLAIGTNSVGWAVITDEYKVPSKKFKVLGNTDRHSIKKNLIGALLFDSGETAEATRLKRTARRRYTRRKNRICYLQEIFSNEMAKVDDSFFHRLEESFLVEEDKKHERHPIFGNIVDEVAYHEKYPTIYHLRKKLVDSTDKADLRLIYLALAHMIKFRGHFLIEGDLNPDNSDVDKLFIQLVQTYNQLFEENPINASGVDAKAILSARLSKSRRLENLIAQLPGEKKNGLFGNLIALSLGLTPNFKSNFDLAEDAKLQLSKDTYDDDLDNLLAQIGDQYADLFLAAKNLSDAILLSDILRVNTEITKAPLSASMIKRYDEHHQDLTLLKALVRQQLPEKYKEIFFDQSKNGYAGYIDGGASQEEFYKFIKPILEKMDGTEELLVKLNREDLLRKQRTFDNGSIPHQIHLGELHAILRRQEDFYPFLKDNREKIEKILTFRIPYYVGPLARGNSRFAWMTRKSEETITPWNFEEVVDKGASAQSFIERMTNFDKNLPNEKVLPKHSLLYEYFTVYNELTKVKYVTEGMRKPAFLSGEQKKAIVDLLFKTNRKVTVKQLKEDYFKKIECFDSVEISGVEDRFNASLGTYHDLLKIIKDKDFLDNEENEDILEDIVLTLTLFEDREMIEERLKTYAHLFDDKVMKQLKRRRYTGWGRLSRKLINGIRDKQSGKTILDFLKSDGFANRNFMQLIHDDSLTFKEDIQKAQVSGQGDSLHEHIANLAGSPAIKKGILQTVKVVDELVKVMGRHKPENIVIEMARENQTTQKGQKNSRERMKRIEEGIKELGSQILKEHPVENTQLQNEKLYLYYLQNGRDMYVDQELDINRLSDYDVDAIVPQSFLKDDSIDNKVLTRSDKNRGKSDNVPSEEVVKKMKNYWRQLLNAKLITQRKFDNLTKAERGGLSELDKAGFIKRQLVETRQITKHVAQILDSRMNTKYDENDKLIREVKVITLKSKLVSDFRKDFQFYKVREINNYHHAHDAYLNAVVGTALIKKYPKLESEFVYGDYKVYDVRKMIAKSEQEIGKATAKYFFYSNIMNFFKTEITLANGEIRKRPLIETNGETGEIVWDKGRDFATVRKVLSMPQVNIVKKTEVQTGGFSKESILPKRNSDKLIARKKDWDPKKYGGFDSPTVAYSVLVVAKVEKGKSKKLKSVKELLGITIMERSSFEKNPIDFLEAKGYKEVKKDLIIKLPKYSLFELENGRKRMLASAGELQKGNELALPSKYVNFLYLASHYEKLKGSPEDNEQKQLFVEQHKHYLDEIIEQISEFSKRVILADANLDKVLSAYNKHRDKPIREQAENIIHLFTLTNLGAPAAFKYFDTTIDRKRYTSTKEVLDATLIHQSITGLYETRIDLSQLGGDNSKKRSLEDNETEIKVSRDTWNTKNMRSLEPPRSKKRIH

SEQ ID NO: 111 - protein, 1653 aa, Artificial Sequence
  chemically synthesized
MPKKKRKVSSFLDGIDKAQDEHEKYHSNWRAMASDFNLPPVVAKEIVASCDKCQLKGEAMHGQVDCSPGIWQLDCTHLEGKVILVAVHVASGYIEAEVIPAETGQETAYFLLKLAGRWPVKTIHTNNGSNFTGATVRAACWWAGIKQEFGIPYNPQSQGVVESMNKELKKIIGQVRDQAEHLKTAVQMAVFIHNFKRKGGIGGYSAGERIVDIIATDIQTKELQKQITKIQNGGGGSGGGGSGGGGSDKKYSIGLAIGTNSVGWAVITDEYKVPSKKFKVLGNTDRHSIKKNLIGALLFDSGETAEATRLKRTARRRYTRRKNRICYLQEIFSNEMAKVDDSFFHRLEESFLVEEDKKHERHPIFGNIVDEVAYHEKYPTIYHLRKKLVDSTDKADLRLIYLALAHMIKFRGHFLIEGDLNPDNSDVDKLFIQLVQTYNQLFEENPINASGVDAKAILSARLSKSRRLENLIAQLPGEKKNGLFGNLIALSLGLTPNFKSNFDLAEDAKLQLSKDTYDDDLDNLLAQIGDQYADLFLAAKNLSDAILLSDILRVNTEITKAPLSASMIKRYDEHHQDLTLLKALVRQQLPEKYKEIFFDQSKNGYAGYIDGGASQEEFYKFIKPILEKMDGTEELLVKLNREDLLRKQRTFDNGSIPHQIHLGELHAILRRQEDFYPFLKDNREKIEKILTFRIPYYVGPLARGNSRFAWMTRKSEETITPWNFEEVVDKGASAQSFIERMTNFDKNLPNEKVLPKHSLLYEYFTVYNELTKVKYVTEGMRKPAFLSGEQKKAIVDLLFKTNRKVTVKQLKEDYFKKIECFDSVEISGVEDRFNASLGTYHDLLKIIKDKDFLDNEENEDILEDIVLTLTLFEDREMIEERLKTYAHLFDDKVMKQLKRRRYTGWGRLSRKLINGIRDKQSGKTILDFLKSDGFANRNFMQLIHDDSLTFKEDIQKAQVSGQGDSLHEHIANLAGSPAIKKGILQTVKVVDELVKVMGRHKPENIVIEMARENQTTQKGQKNSRERMKRIEEGIKELGSQILKEHPVENTQLQNEKLYLYYLQNGRDMYVDQELDINRLSDYDVDAIVPQSFLKDDSIDNKVLTRSDKNRGKSDNVPSEEVVKKMKNYWRQLLNAKLITQRKFDNLTKAERGGLSELDKAGFIKRQLVETRQITKHVAQILDSRMNTKYDENDKLIREVKVITLKSKLVSDFRKDFQFYKVREINNYHHAHDAYLNAVVGTALIKKYPKLESEFVYGDYKVYDVRKMIAKSEQEIGKATAKYFFYSNIMNFFKTEITLANGEIRKRPLIETNGETGEIVWDKGRDFATVRKVLSMPQVNIVKKTEVQTGGFSKESILPKRNSDKLIARKKDWDPKKYGGFDSPTVAYSVLVVAKVEKGKSKKLKSVKELLGITIMERSSFEKNPIDFLEAKGYKEVKKDLIIKLPKYSLFELENGRKRMLASAGELQKGNELALPSKYVNFLYLASHYEKLKGSPEDNEQKQLFVEQHKHYLDEIIEQISEFSKRVILADANLDKVLSAYNKHRDKPIREQAENIIHLFTLTNLGAPAAFKYFDTTIDRKRYTSTKEVLDATLIHQSITGLYETRIDLSQLGGDNSKKRSLEDNETEIKVSRDTWNTKNMRSLEPPRSKKRIH

SEQ ID NO: 112 - protein, 1719 aa, Artificial Sequence
  chemically synthesized
MPKKKRKVSSFLDGIDKAQDEHEKYHSNWRAMASDFNLPPVVAKEIVASCDKCQLKGEAMHGQVDCSPGIWQLDCTHLEGKVILVAVHVASGYIEAEVIPAETGQETAYFLLKLAGRWPVKTIHTDNGSNFTGATVRAACWWAGIKQEFGIPYNPQSQGVVESMNKELKKIIGQVRDQAEHLKTAVQMAVFIHNKKRKGGIGGYSAGERIVDIIATDIQTKELQKQITKIQNFRVYYRDSRNPLWKGPAKLLWKGEGAVVIQDNSDIKVVPRRKAKIIRDYGKQMAGDDSVASRQDEDGGGGSGGGGSGGGGSDKKYSIGLAIGTNSVGWAVITDEYKVPSKKFKVLGNTDRHSIKKNLIGALLFDSGETAEATRLKRTARRRYTRRKNRICYLQEIFSNEMAKVDDSFFHRLEESFLVEEDKKHERHPIFGNIVDEVAYHEKYPTIYHLRKKLVDSTDKADLRLIYLALAHMIKFRGHFLIEGDLNPDNSDVDKLFIQLVQTYNQLFEENPINASGVDAKAILSARLSKSRRLENLIAQLPGEKKNGLFGNLIALSLGLTPNFKSNFDLAEDAKLQLSKDTYDDDLDNLLAQIGDQYADLFLAAKNLSDAILLSDILRVNTEITKAPLSASMIKRYDEHHQDLTLLKALVRQQLPEKYKEIFFDQSKNGYAGYIDGGASQEEFYKFIKPILEKMDGTEELLVKLNREDLLRKQRTFDNGSIPHQIHLGELHAILRRQEDFYPFLKDNREKIEKILTFRIPYYVGPLARGNSRFAWMTRKSEETITPWNFEEVVDKGASAQSFIERMTNFDKNLPNEKVLPKHSLLYEYFTVYNELTKVKYVTEGMRKPAFLSGEQKKAIVDLLFKTNRKVTVKQLKEDYFKKIECFDSVEISGVEDRFNASLGTYHDLLKIIKDKDFLDNEENEDILEDIVLTLTLFEDREMIEERLKTYAHLFDDKVMKQLKRRRYTGWGRLSRKLINGIRDKQSGKTILDFLKSDGFANRNFMQLIHDDSLTFKEDIQKAQVSGQGDSLHEHIANLAGSPAIKKGILQTVKVVDELVKVMGRHKPENIVIEMARENQTTQKGQKNSRERMKRIEEGIKELGSQILKEHPVENTQLQNEKLYLYYLQNGRDMYVDQELDINRLSDYDVDAIVPQSFLKDDSIDNKVLTRSDKNRGKSDNVPSEEVVKKMKNYWRQLLNAKLITQRKFDNLTKAERGGLSELDKAGFIKRQLVETRQITKHVAQILDSRMNTKYDENDKLIREVKVITLKSKLVSDFRKDFQFYKVREINNYHHAHDAYLNAVVGTALIKKYPKLESEFVYGDYKVYDVRKMIAKSEQEIGKATAKYFFYSNIMNFFKTEITLANGEIRKRPLIETNGETGEIVWDKGRDFATVRKVLSMPQVNIVKKTEVQTGGFSKESILPKRNSDKLIARKKDWDPKKYGGFDSPTVAYSVLVVAKVEKGKSKKLKSVKELLGITIMERSSFEKNPIDFLEAKGYKEVKKDLIIKLPKYSLFELENGRKRMLASAGELQKGNELALPSKYVNFLYLASHYEKLKGSPEDNEQKQLFVEQHKHYLDEIIEQISEFSKRVILADANLDKVLSAYNKHRDKPIREQAENIIHLFTLTNLGAPAAFKYFDTTIDRKRYTSTKEVLDATLIHQSITGLYETRIDLSQLGGDNSKKRSLEDNETEIKVSRDTWNTKNMRSLEPPRSKKRIH

SEQ ID NO: 113 - protein, 1719 aa, Artificial Sequence
  chemically synthesized
MPKKKRKVSSFLDGIDKAQDEHEKYHSNWRAMASDFNLPPVVAKEIVASCDKCQLKGEAMHGQVDCSPGIWQLDCTHLEGKVILVAVHVASGYIEAEVIPAETGQETAYFLLKLAGRWPVKTIHTDNGSNFTGATVRAACWWAGIKQEFGIPYNPQSQGVVESMNKELKKIIGQVRDQAEHLKTAVQMAVFIHNFKRKGGIGGYSAGERIVDIIATDIQTKELQKQITKIQNFRVYYRDSRNPLWKGPAKLLWKGEGAVVIQDNSDIKVVPRRKAKIIRDYGKQMAGDDSVASRQDEDGGGGSGGGGSGGGGSDKKYSIGLAIGTNSVGWAVITDEYKVPSKKFKVLGNTDRHSIKKNLIGALLFDSGETAEATRLKRTARRRYTRRKNRICYLQEIFSNEMAKVDDSFFHRLEESFLVEEDKKHERHPIFGNIVDEVAYHEKYPTIYHLRKKLVDSTDKADLRLIYLALAHMIKFRGHFLIEGDLNPDNSDVDKLFIQLVQTYNQLFEENPINASGVDAKAILSARLSKSRRLENLIAQLPGEKKNGLFGNLIALSLGLTPNFKSNFDLAEDAKLQLSKDTYDDDLDNLLAQIGDQYADLFLAAKNLSDAILLSDILRVNTEITKAPLSASMIKRYDEHHQDLTLLKALVRQQLPEKYKEIFFDQSKNGYAGYIDGGASQEEFYKFIKPILEKMDGTEELLVKLNREDLLRKQRTFDNGSIPHQIHLGELHAILRRQEDFYPFLKDNREKIEKILTFRIPYYVGPLARGNSRFAWMTRKSEETITPWNFEEVVDKGASAQSFIERMTNFDKNLPNEKVLPKHSLLYEYFTVYNELTKVKYVTEGMRKPAFLSGEQKKAIVDLLFKTNRKVTVKQLKEDYFKKIECFDSVEISGVEDRFNASLGTYHDLLKIIKDKDFLDNEENEDILEDIVLTLTLFEDREMIEERLKTYAHLFDDKVMKQLKRRRYTGWGRLSRKLINGIRDKQSGKTILDFLKSDGFANRNFMQLIHDDSLTFKEDIQKAQVSGQGDSLHEHIANLAGSPAIKKGILQTVKVVDELVKVMGRHKPENIVIEMARENQTTQKGQKNSRERMKRIEEGIKELGSQILKEHPVENTQLQNEKLYLYYLQNGRDMYVDQELDINRLSDYDVDAIVPQSFLKDDSIDNKVLTRSDKNRGKSDNVPSEEVVKKMKNYWRQLLNAKLITQRKFDNLTKAERGGLSELDKAGFIKRQLVETRQITKHVAQILDSRMNTKYDENDKLIREVKVITLKSKLVSDFRKDFQFYKVREINNYHHAHDAYLNAVVGTALIKKYPKLESEFVYGDYKVYDVRKMIAKSEQEIGKATAKYFFYSNIMNFFKTEITLANGEIRKRPLIETNGETGEIVWDKGRDFATVRKVLSMPQVNIVKKTEVQTGGFSKESILPKRNSDKLIARKKDWDPKKYGGFDSPTVAYSVLVVAKVEKGKSKKLKSVKELLGITIMERSSFEKNPIDFLEAKGYKEVKKDLIIKLPKYSLFELENGRKRMLASAGELQKGNELALPSKYVNFLYLASHYEKLKGSPEDNEQKQLFVEQHKHYLDEIIEQISEFSKRVILADANLDKVLSAYNKHRDKPIREQAENIIHLFTLTNLGAPAAFKYFDTTIDRKRYTSTKEVLDATLIHQSITGLYETRIDLSQLGGDNSKKRSLEDNETEIKVSRDTWNTKNMRSLEPPRSKKRIH

SEQ ID NO: 114 - protein, 1719 aa, Artificial Sequence
  chemically synthesized
MPKKKRKVSSFLDGIDKAQDEHEKYHSNWRAMASDFNLPPVVAKEIVASCDKCQLKGEAMHGQVDCSPGIWQLDCTHLEGKVILVAVHVASGYIEAEVIPAETGQETAYFLLKLAGRWPVKTIHTDNGSNFTGATVRAACWWAGIKQEFGIPYNPQSQGVVESMNKELKKIIGQVRDQAEHLKTAVQMAVFIHNKKRKGGIGGYSAGERIVDIIATDIQTKELQKQITKIQNFRVYYRDSRNPLWKGPAKLLWKGEGAVVIQDNSDIKVVPRRKAKIIRDYGKQMAGDDCVASRQDEDGGGGSGGGGSGGGGSDKKYSIGLAIGTNSVGWAVITDEYKVPSKKFKVLGNTDRHSIKKNLIGALLFDSGETAEATRLKRTARRRYTRRKNRICYLQEIFSNEMAKVDDSFFHRLEESFLVEEDKKHERHPIFGNIVDEVAYHEKYPTIYHLRKKLVDSTDKADLRLIYLALAHMIKFRGHFLIEGDLNPDNSDVDKLFIQLVQTYNQLFEENPINASGVDAKAILSARLSKSRRLENLIAQLPGEKKNGLFGNLIALSLGLTPNFKSNFDLAEDAKLQLSKDTYDDDLDNLLAQIGDQYADLFLAAKNLSDAILLSDILRVNTEITKAPLSASMIKRYDEHHQDLTLLKALVRQQLPEKYKEIFFDQSKNGYAGYIDGGASQEEFYKFIKPILEKMDGTEELLVKLNREDLLRKQRTFDNGSIPHQIHLGELHAILRRQEDFYPFLKDNREKIEKILTFRIPYYVGPLARGNSRFAWMTRKSEETITPWNFEEVVDKGASAQSFIERMTNFDKNLPNEKVLPKHSLLYEYFTVYNELTKVKYVTEGMRKPAFLSGEQKKAIVDLLFKTNRKVTVKQLKEDYFKKIECFDSVEISGVEDRFNASLGTYHDLLKIIKDKDFLDNEENEDILEDIVLTLTLFEDREMIEERLKTYAHLFDDKVMKQLKRRRYTGWGRLSRKLINGIRDKQSGKTILDFLKSDGFANRNFMQLIHDDSLTFKEDIQKAQVSGQGDSLHEHIANLAGSPAIKKGILQTVKVVDELVKVMGRHKPENIVIEMARENQTTQKGQKNSRERMKRIEEGIKELGSQILKEHPVENTQLQNEKLYLYYLQNGRDMYVDQELDINRLSDYDVDAIVPQSFLKDDSIDNKVLTRSDKNRGKSDNVPSEEVVKKMKNYWRQLLNAKLITQRKFDNLTKAERGGLSELDKAGFIKRQLVETRQITKHVAQILDSRMNTKYDENDKLIREVKVITLKSKLVSDFRKDFQFYKVREINNYHHAHDAYLNAVVGTALIKKYPKLESEFVYGDYKVYDVRKMIAKSEQEIGKATAKYFFYSNIMNFFKTEITLANGEIRKRPLIETNGETGEIVWDKGRDFATVRKVLSMPQVNIVKKTEVQTGGFSKESILPKRNSDKLIARKKDWDPKKYGGFDSPTVAYSVLVVAKVEKGKSKKLKSVKELLGITIMERSSFEKNPIDFLEAKGYKEVKKDLIIKLPKYSLFELENGRKRMLASAGELQKGNELALPSKYVNFLYLASHYEKLKGSPEDNEQKQLFVEQHKHYLDEIIEQISEFSKRVILADANLDKVLSAYNKHRDKPIREQAENIIHLFTLTNLGAPAAFKYFDTTIDRKRYTSTKEVLDATLIHQSITGLYETRIDLSQLGGDNSKKRSLEDNETEIKVSRDTWNTKNMRSLEPPRSKKRIH

SEQ ID NO: 115 - protein, 1653 aa, Artificial Sequence
  chemically synthesized
MPKKKRKVSSFLDGIDKAQDEHEKYHSNWRAMASDFNLPPVVAKEIVASCDKCQLKGEAMHGQVDCSPGIWQLDCTHLEGKVILVAVHVASGYIEAEVIPAETGQETAYFLLKLAGRWPVKTIHTDNGSNFTGATVRAACWWAGIKQEFGIPYNPQSQGVVESMNKELKKIIGQVRDQAEHLKTAVQMAVFIHNKKRKGGIGGYSAGERIVDIIATDIQTKELQKQITKIQNGGGGSGGGGSGGGGSDKKYSIGLAIGTNSVGWAVITDEYKVPSKKFKVLGNTDRHSIKKNLIGALLFDSGETAEATRLKRTARRRYTRRKNRICYLQEIFSNEMAKVDDSFFHRLEESFLVEEDKKHERHPIFGNIVDEVAYHEKYPTIYHLRKKLVDSTDKADLRLIYLALAHMIKFRGHFLIEGDLNPDNSDVDKLFIQLVQTYNQLFEENPINASGVDAKAILSARLSKSRRLENLIAQLPGEKKNGLFGNLIALSLGLTPNFKSNFDLAEDAKLQLSKDTYDDDLDNLLAQIGDQYADLFLAAKNLSDAILLSDILRVNTEITKAPLSASMIKRYDEHHQDLTLLKALVRQQLPEKYKEIFFDQSKNGYAGYIDGGASQEEFYKFIKPILEKMDGTEELLVKLNREDLLRKQRTFDNGSIPHQIHLGELHAILRRQEDFYPFLKDNREKIEKILTFRIPYYVGPLARGNSRFAWMTRKSEETITPWNFEEVVDKGASAQSFIERMTNFDKNLPNEKVLPKHSLLYEYFTVYNELTKVKYVTEGMRKPAFLSGEQKKAIVDLLFKTNRKVTVKQLKEDYFKKIECFDSVEISGVEDRFNASLGTYHDLLKIIKDKDFLDNEENEDILEDIVLTLTLFEDREMIEERLKTYAHLFDDKVMKQLKRRRYTGWGRLSRKLINGIRDKQSGKTILDFLKSDGFANRNFMQLIHDDSLTFKEDIQKAQVSGQGDSLHEHIANLAGSPAIKKGILQTVKVVDELVKVMGRHKPENIVIEMARENQTTQKGQKNSRERMKRIEEGIKELGSQILKEHPVENTQLQNEKLYLYYLQNGRDMYVDQELDINRLSDYDVDAIVPQSFLKDDSIDNKVLTRSDKNRGKSDNVPSEEVVKKMKNYWRQLLNAKLITQRKFDNLTKAERGGLSELDKAGFIKRQLVETRQITKHVAQILDSRMNTKYDENDKLIREVKVITLKSKLVSDFRKDFQFYKVREINNYHHAHDAYLNAVVGTALIKKYPKLESEFVYGDYKVYDVRKMIAKSEQEIGKATAKYFFYSNIMNFFKTEITLANGEIRKRPLIETNGETGEIVWDKGRDFATVRKVLSMPQVNIVKKTEVQTGGFSKESILPKRNSDKLIARKKDWDPKKYGGFDSPTVAYSVLVVAKVEKGKSKKLKSVKELLGITIMERSSFEKNPIDFLEAKGYKEVKKDLIIKLPKYSLFELENGRKRMLASAGELQKGNELALPSKYVNFLYLASHYEKLKGSPEDNEQKQLFVEQHKHYLDEIIEQISEFSKRVILADANLDKVLSAYNKHRDKPIREQAENIIHLFTLTNLGAPAAFKYFDTTIDRKRYTSTKEVLDATLIHQSITGLYETRIDLSQLGGDNSKKRSLEDNETEIKVSRDTWNTKNMRSLEPPRSKKRIH

SEQ ID NO: 116 - protein, 1719 aa, Artificial Sequence
  chemically synthesized
MPKKKRKVSSFLDGIDKAQDEHEKYHSNWRAMASDFNLPPVVAKEIVASCDKCQLKGEAMHGQVDCSPGIWQLDCTHLEGKVILVAVHVASGYIEAEVIPAETGQEAAYFLLKLAGRWPVKTIHTDNGSNFTGATVRAACWWAGIKQEFGIPRNPQSQGVVESMNKELKKIIGQVRDQAEHLKTAVQMAVFIHNFKRKGGIGGYSAGERIVDIIATDIQTKELQKQITKIQNFRVYYRDSRNPLWKGPAKLLWKGEGAVVIQDNSDIKVVPRRKAKIIRDYGKQMAGDDCVASRQDEDGGGGSGGGGSGGGGSDKKYSIGLAIGTNSVGWAVITDEYKVPSKKFKVLGNTDRHSIKKNLIGALLFDSGETAEATRLKRTARRRYTRRKNRICYLQEIFSNEMAKVDDSFFHRLEESFLVEEDKKHERHPIFGNIVDEVAYHEKYPTIYHLRKKLVDSTDKADLRLIYLALAHMIKFRGHFLIEGDLNPDNSDVDKLFIQLVQTYNQLFEENPINASGVDAKAILSARLSKSRRLENLIAQLPGEKKNGLFGNLIALSLGLTPNFKSNFDLAEDAKLQLSKDTYDDDLDNLLAQIGDQYADLFLAAKNLSDAILLSDILRVNTEITKAPLSASMIKRYDEHHQDLTLLKALVRQQLPEKYKEIFFDQSKNGYAGYIDGGASQEEFYKFIKPILEKMDGTEELLVKLNREDLLRKQRTFDNGSIPHQIHLGELHAILRRQEDFYPFLKDNREKIEKILTFRIPYYVGPLARGNSRFAWMTRKSEETITPWNFEEVVDKGASAQSFIERMTNFDKNLPNEKVLPKHSLLYEYFTVYNELTKVKYVTEGMRKPAFLSGEQKKAIVDLLFKTNRKVTVKQLKEDYFKKIECFDSVEISGVEDRFNASLGTYHDLLKIIKDKDFLDNEENEDILEDIVLTLTLFEDREMIEERLKTYAHLFDDKVMKQLKRRRYTGWGRLSRKLINGIRDKQSGKTILDFLKSDGFANRNFMQLIHDDSLTFKEDIQKAQVSGQGDSLHEHIANLAGSPAIKKGILQTVKVVDELVKVMGRHKPENIVIEMARENQTTQKGQKNSRERMKRIEEGIKELGSQILKEHPVENTQLQNEKLYLYYLQNGRDMYVDQELDINRLSDYDVDAIVPQSFLKDDSIDNKVLTRSDKNRGKSDNVPSEEVVKKMKNYWRQLLNAKLITQRKFDNLTKAERGGLSELDKAGFIKRQLVETRQITKHVAQILDSRMNTKYDENDKLIREVKVITLKSKLVSDFRKDFQFYKVREINNYHHAHDAYLNAVVGTALIKKYPKLESEFVYGDYKVYDVRKMIAKSEQEIGKATAKYFFYSNIMNFFKTEITLANGEIRKRPLIETNGETGEIVWDKGRDFATVRKVLSMPQVNIVKKTEVQTGGFSKESILPKRNSDKLIARKKDWDPKKYGGFDSPTVAYSVLVVAKVEKGKSKKLKSVKELLGITIMERSSFEKNPIDFLEAKGYKEVKKDLIIKLPKYSLFELENGRKRMLASAGELQKGNELALPSKYVNFLYLASHYEKLKGSPEDNEQKQLFVEQHKHYLDEIIEQISEFSKRVILADANLDKVLSAYNKHRDKPIREQAENIIHLFTLTNLGAPAAFKYFDTTIDRKRYTSTKEVLDATLIHQSITGLYETRIDLSQLGGDNSKKRSLEDNETEIKVSRDTWNTKNMRSLEPPRSKKRIH

SEQ ID NO: 117 - protein, 1653 aa, Artificial Sequence
  chemically synthesized
MPKKKRKVSSFLDGIDKAQDEHEKYHSNWRAMASDFNLPPVVAKEIVASCDKCQLKGEAMHGQVDCSPGIWQLDCTHLEGKVILVAVHVASGYIEAEVIPAETGQEAAYFLLKLAGRWPVKTIHTDNGSNFTGATVRAACWWAGIKQEFGIPRNPQSQGVVESMNKELKKIIGQVRDQAEHLKTAVQMAVFIHNFKRKGGIGGYSAGERIVDIIATDIQTKELQKQITKIQNGGGGSGGGGSGGGGSDKKYSIGLAIGTNSVGWAVITDEYKVPSKKFKVLGNTDRHSIKKNLIGALLFDSGETAEATRLKRTARRRYTRRKNRICYLQEIFSNEMAKVDDSFFHRLEESFLVEEDKKHERHPIFGNIVDEVAYHEKYPTIYHLRKKLVDSTDKADLRLIYLALAHMIKFRGHFLIEGDLNPDNSDVDKLFIQLVQTYNQLFEENPINASGVDAKAILSARLSKSRRLENLIAQLPGEKKNGLFGNLIALSLGLTPNFKSNFDLAEDAKLQLSKDTYDDDLDNLLAQIGDQYADLFLAAKNLSDAILLSDILRVNTEITKAPLSASMIKRYDEHHQDLTLLKALVRQQLPEKYKEIFFDQSKNGYAGYIDGGASQEEFYKFIKPILEKMDGTEELLVKLNREDLLRKQRTFDNGSIPHQIHLGELHAILRRQEDFYPFLKDNREKIEKILTFRIPYYVGPLARGNSRFAWMTRKSEETITPWNFEEVVDKGASAQSFIERMTNFDKNLPNEKVLPKHSLLYEYFTVYNELTKVKYVTEGMRKPAFLSGEQKKAIVDLLFKTNRKVTVKQLKEDYFKKIECFDSVEISGVEDRFNASLGTYHDLLKIIKDKDFLDNEENEDILEDIVLTLTLFEDREMIEERLKTYAHLFDDKVMKQLKRRRYTGWGRLSRKLINGIRDKQSGKTILDFLKSDGFANRNFMQLIHDDSLTFKEDIQKAQVSGQGDSLHEHIANLAGSPAIKKGILQTVKVVDELVKVMGRHKPENIVIEMARENQTTQKGQKNSRERMKRIEEGIKELGSQILKEHPVENTQLQNEKLYLYYLQNGRDMYVDQELDINRLSDYDVDAIVPQSFLKDDSIDNKVLTRSDKNRGKSDNVPSEEVVKKMKNYWRQLLNAKLITQRKFDNLTKAERGGLSELDKAGFIKRQLVETRQITKHVAQILDSRMNTKYDENDKLIREVKVITLKSKLVSDFRKDFQFYKVREINNYHHAHDAYLNAVVGTALIKKYPKLESEFVYGDYKVYDVRKMIAKSEQEIGKATAKYFFYSNIMNFFKTEITLANGEIRKRPLIETNGETGEIVWDKGRDFATVRKVLSMPQVNIVKKTEVQTGGFSKESILPKRNSDKLIARKKDWDPKKYGGFDSPTVAYSVLVVAKVEKGKSKKLKSVKELLGITIMERSSFEKNPIDFLEAKGYKEVKKDLIIKLPKYSLFELENGRKRMLASAGELQKGNELALPSKYVNFLYLASHYEKLKGSPEDNEQKQLFVEQHKHYLDEIIEQISEFSKRVILADANLDKVLSAYNKHRDKPIREQAENIIHLFTLTNLGAPAAFKYFDTTIDRKRYTSTKEVLDATLIHQSITGLYETRIDLSQLGGDNSKKRSLEDNETEIKVSRDTWNTKNMRSLEPPRSKKRIH

SEQ ID NO: 118 - protein, 1719 aa, Artificial Sequence
  chemically synthesized
MPKKKRKVSSFLDGIDKAQDEHEKYHSNWRAMASDFNLPPVVAKEIVASCDKCQLKGEAMHGQVDCSPGIWQLDCTHLEGKVILVAVHVASGYIEAEVIPAETGQETAYFLLKLAGRWPVKTIHTDNGSNFTGATVRAACWWAGIKQEFSIPYNPQSHGVVESMNKELKKIIGQVRDQAEHLKTAVQMAVFIHNFKRKGGIGGYSAGERIVDIIATDIQTKELQKQITKIQNFRVYYRDSRNPLWKGPAKLLWKGEGAVVIQDNSDIKVVPRRKAKIIRDYGKQMAGDDCVASRQDEDGGGGSGGGGSGGGGSDKKYSIGLAIGTNSVGWAVITDEYKVPSKKFKVLGNTDRHSIKKNLIGALLFDSGETAEATRLKRTARRRYTRRKNRICYLQEIFSNEMAKVDDSFFHRLEESFLVEEDKKHERHPIFGNIVDEVAYHEKYPTIYHLRKKLVDSTDKADLRLIYLALAHMIKFRGHFLIEGDLNPDNSDVDKLFIQLVQTYNQLFEENPINASGVDAKAILSARLSKSRRLENLIAQLPGEKKNGLFGNLIALSLGLTPNFKSNFDLAEDAKLQLSKDTYDDDLDNLLAQIGDQYADLFLAAKNLSDAILLSDILRVNTEITKAPLSASMIKRYDEHHQDLTLLKALVRQQLPEKYKEIFFDQSKNGYAGYIDGGASQEEFYKFIKPILEKMDGTEELLVKLNREDLLRKQRTFDNGSIPHQIHLGELHAILRRQEDFYPFLKDNREKIEKILTFRIPYYVGPLARGNSRFAWMTRKSEETITPWNFEEVVDKGASAQSFIERMTNFDKNLPNEKVLPKHSLLYEYFTVYNELTKVKYVTEGMRKPAFLSGEQKKAIVDLLFKTNRKVTVKQLKEDYFKKIECFDSVEISGVEDRFNASLGTYHDLLKIIKDKDFLDNEENEDILEDIVLTLTLFEDREMIEERLKTYAHLFDDKVMKQLKRRRYTGWGRLSRKLINGIRDKQSGKTILDFLKSDGFANRNFMQLIHDDSLTFKEDIQKAQVSGQGDSLHEHIANLAGSPAIKKGILQTVKVVDELVKVMGRHKPENIVIEMARENQTTQKGQKNSRERMKRIEEGIKELGSQILKEHPVENTQLQNEKLYLYYLQNGRDMYVDQELDINRLSDYDVDAIVPQSFLKDDSIDNKVLTRSDKNRGKSDNVPSEEVVKKMKNYWRQLLNAKLITQRKFDNLTKAERGGLSELDKAGFIKRQLVETRQITKHVAQILDSRMNTKYDENDKLIREVKVITLKSKLVSDFRKDFQFYKVREINNYHHAHDAYLNAVVGTALIKKYPKLESEFVYGDYKVYDVRKMIAKSEQEIGKATAKYFFYSNIMNFFKTEITLANGEIRKRPLIETNGETGEIVWDKGRDFATVRKVLSMPQVNIVKKTEVQTGGFSKESILPKRNSDKLIARKKDWDPKKYGGFDSPTVAYSVLVVAKVEKGKSKKLKSVKELLGITIMERSSFEKNPIDFLEAKGYKEVKKDLIIKLPKYSLFELENGRKRMLASAGELQKGNELALPSKYVNFLYLASHYEKLKGSPEDNEQKQLFVEQHKHYLDEIIEQISEFSKRVILADANLDKVLSAYNKHRDKPIREQAENIIHLFTLTNLGAPAAFKYFDTTIDRKRYTSTKEVLDATLIHQSITGLYETRIDLSQLGGDNSKKRSLEDNETEIKVSRDTWNTKNMRSLEPPRSKKRIH

SEQ ID NO: 119 - protein, 1653 aa, Artificial Sequence
  chemically synthesized
MPKKKRKVSSFLDGIDKAQDEHEKYHSNWRAMASDFNLPPVVAKEIVASCDKCQLKGEAMHGQVDCSPGIWQLDCTHLEGKVILVAVHVASGYIEAEVIPAETGQETAYFLLKLAGRWPVKTIHTDNGSNFTGATVRAACWWAGIKQEFSIPYNPQSHGVVESMNKELKKIIGQVRDQAEHLKTAVQMAVFIHNFKRKGGIGGYSAGERIVDIIATDIQTKELQKQITKIQNGGGGSGGGGSGGGGSDKKYSIGLAIGTNSVGWAVITDEYKVPSKKFKVLGNTDRHSIKKNLIGALLFDSGETAEATRLKRTARRRYTRRKNRICYLQEIFSNEMAKVDDSFFHRLEESFLVEEDKKHERHPIFGNIVDEVAYHEKYPTIYHLRKKLVDSTDKADLRLIYLALAHMIKFRGHFLIEGDLNPDNSDVDKLFIQLVQTYNQLFEENPINASGVDAKAILSARLSKSRRLENLIAQLPGEKKNGLFGNLIALSLGLTPNFKSNFDLAEDAKLQLSKDTYDDDLDNLLAQIGDQYADLFLAAKNLSDAILLSDILRVNTEITKAPLSASMIKRYDEHHQDLTLLKALVRQQLPEKYKEIFFDQSKNGYAGYIDGGASQEEFYKFIKPILEKMDGTEELLVKLNREDLLRKQRTFDNGSIPHQIHLGELHAILRRQEDFYPFLKDNREKIEKILTFRIPYYVGPLARGNSRFAWMTRKSEETITPWNFEEVVDKGASAQSFIERMTNFDKNLPNEKVLPKHSLLYEYFTVYNELTKVKYVTEGMRKPAFLSGEQKKAIVDLLFKTNRKVTVKQLKEDYFKKIECFDSVEISGVEDRFNASLGTYHDLLKIIKDKDFLDNEENEDILEDIVLTLTLFEDREMIEERLKTYAHLFDDKVMKQLKRRRYTGWGRLSRKLINGIRDKQSGKTILDFLKSDGFANRNFMQLIHDDSLTFKEDIQKAQVSGQGDSLHEHIANLAGSPAIKKGILQTVKVVDELVKVMGRHKPENIVIEMARENQTTQKGQKNSRERMKRIEEGIKELGSQILKEHPVENTQLQNEKLYLYYLQNGRDMYVDQELDINRLSDYDVDAIVPQSFLKDDSIDNKVLTRSDKNRGKSDNVPSEEVVKKMKNYWRQLLNAKLITQRKFDNLTKAERGGLSELDKAGFIKRQLVETRQITKHVAQILDSRMNTKYDENDKLIREVKVITLKSKLVSDFRKDFQFYKVREINNYHHAHDAYLNAVVGTALIKKYPKLESEFVYGDYKVYDVRKMIAKSEQEIGKATAKYFFYSNIMNFFKTEITLANGEIRKRPLIETNGETGEIVWDKGRDFATVRKVLSMPQVNIVKKTEVQTGGFSKESILPKRNSDKLIARKKDWDPKKYGGFDSPTVAYSVLVVAKVEKGKSKKLKSVKELLGITIMERSSFEKNPIDFLEAKGYKEVKKDLIIKLPKYSLFELENGRKRMLASAGELQKGNELALPSKYVNFLYLASHYEKLKGSPEDNEQKQLFVEQHKHYLDEIIEQISEFSKRVILADANLDKVLSAYNKHRDKPIREQAENIIHLFTLTNLGAPAAFKYFDTTIDRKRYTSTKEVLDATLIHQSITGLYETRIDLSQLGGDNSKKRSLEDNETEIKVSRDTWNTKNMRSLEPPRSKKRIH

SEQ ID NO: 120 - protein, 1754 aa, Artificial Sequence
  chemically synthesized
MPKKKRKVSSPLREAKDLHTALHIGPRALSKACNISMQQAREVVQTCPHCNSAPALEAGVNPRGLGPLQIWQTDFTLEPRMAPRSWLAVTVDTASSAIVVTQHGRVTSVAVQHHWATAIAVLGRPKAIKTDNGSCFTSKSTREWLARWGIAHTTGIPGNSQGQAMVERANRLLKDRIRVLAEGDGFMKRIPTSKQGELLAKAMYALNHFERGENTKTPIQKHWRPTVLTEGPPVKIRIETGEWEKGWNVLVWGRGYAAVKNRDTDKVIWVPSRKVKPDITQKDEVTKKDEASPLFAGISDWIPWEDEQEGLQGETASNKQERPGEDTLAANESGGGGSGGGGSGGGGSDKKYSIGLAIGTNSVGWAVITDEYKVPSKKFKVLGNTDRHSIKKNLIGALLFDSGETAEATRLKRTARRRYTRRKNRICYLQEIFSNEMAKVDDSFFHRLEESFLVEEDKKHERHPIFGNIVDEVAYHEKYPTIYHLRKKLVDSTDKADLRLIYLALAHMIKFRGHFLIEGDLNPDNSDVDKLFIQLVQTYNQLFEENPINASGVDAKAILSARLSKSRRLENLIAQLPGEKKNGLFGNLIALSLGLTPNFKSNFDLAEDAKLQLSKDTYDDDLDNLLAQIGDQYADLFLAAKNLSDAILLSDILRVNTEITKAPLSASMIKRYDEHHQDLTLLKALVRQQLPEKYKEIFFDQSKNGYAGYIDGGASQEEFYKFIKPILEKMDGTEELLVKLNREDLLRKQRTFDNGSIPHQIHLGELHAILRRQEDFYPFLKDNREKIEKILTFRIPYYVGPLARGNSRFAWMTRKSEETITPWNFEEVVDKGASAQSFIERMTNFDKNLPNEKVLPKHSLLYEYFTVYNELTKVKYVTEGMRKPAFLSGEQKKAIVDLLFKTNRKVTVKQLKEDYFKKIECFDSVEISGVEDRFNASLGTYHDLLKIIKDKDFLDNEENEDILEDIVLTLTLFEDREMIEERLKTYAHLFDDKVMKQLKRRRYTGWGRLSRKLINGIRDKQSGKTILDFLKSDGFANRNFMQLIHDDSLTFKEDIQKAQVSGQGDSLHEHIANLAGSPAIKKGILQTVKVVDELVKVMGRHKPENIVIEMARENQTTQKGQKNSRERMKRIEEGIKELGSQILKEHPVENTQLQNEKLYLYYLQNGRDMYVDQELDINRLSDYDVDAIVPQSFLKDDSIDNKVLTRSDKNRGKSDNVPSEEVVKKMKNYWRQLLNAKLITQRKFDNLTKAERGGLSELDKAGFIKRQLVETRQITKHVAQILDSRMNTKYDENDKLIREVKVITLKSKLVSDFRKDFQFYKVREINNYHHAHDAYLNAVVGTALIKKYPKLESEFVYGDYKVYDVRKMIAKSEQEIGKATAKYFFYSNIMNFFKTEITLANGEIRKRPLIETNGETGEIVWDKGRDFATVRKVLSMPQVNIVKKTEVQTGGFSKESILPKRNSDKLIARKKDWDPKKYGGFDSPTVAYSVLVVAKVEKGKSKKLKSVKELLGITIMERSSFEKNPIDFLEAKGYKEVKKDLIIKLPKYSLFELENGRKRMLASAGELQKGNELALPSKYVNFLYLASHYEKLKGSPEDNEQKQLFVEQHKHYLDEIIEQISEFSKRVILADANLDKVLSAYNKHRDKPIREQAENIIHLFTLTNLGAPAAFKYFDTTIDRKRYTSTKEVLDATLIHQSITGLYETRIDLSQLGGDNSKKRSLEDNETEIKVSRDTWNTKNMRSLEPPRSKKRIH

SEQ ID NO: 121 - protein, 1652 aa, Artificial Sequence
  chemically synthesized
MPKKKRKVSSPLREAKDLHTALHIGPRALSKACNISMQQAREVVQTCPHCNSAPALEAGVNPRGLGPLQIWQTDFTLEPRMAPRSWLAVTVDTASSAIVVTQHGRVTSVAVQHHWATAIAVLGRPKAIKTDNGSCFTSKSTREWLARWGIAHTTGIPGNSQGQAMVERANRLLKDRIRVLAEGDGFMKRIPTSKQGELLAKAMYALNHFERGENTKTPIQKHWRPTVLTEGGGGGSGGGGSGGGGSDKKYSIGLAIGTNSVGWAVITDEYKVPSKKFKVLGNTDRHSIKKNLIGALLFDSGETAEATRLKRTARRRYTRRKNRICYLQEIFSNEMAKVDDSFFHRLEESFLVEEDKKHERHPIFGNIVDEVAYHEKYPTIYHLRKKLVDSTDKADLRLIYLALAHMIKFRGHFLIEGDLNPDNSDVDKLFIQLVQTYNQLFEENPINASGVDAKAILSARLSKSRRLENLIAQLPGEKKNGLFGNLIALSLGLTPNFKSNFDLAEDAKLQLSKDTYDDDLDNLLAQIGDQYADLFLAAKNLSDAILLSDILRVNTEITKAPLSASMIKRYDEHHQDLTLLKALVRQQLPEKYKEIFFDQSKNGYAGYIDGGASQEEFYKFIKPILEKMDGTEELLVKLNREDLLRKQRTFDNGSIPHQIHLGELHAILRRQEDFYPFLKDNREKIEKILTFRIPYYVGPLARGNSRFAWMTRKSEETITPWNFEEVVDKGASAQSFIERMTNFDKNLPNEKVLPKHSLLYEYFTVYNELTKVKYVTEGMRKPAFLSGEQKKAIVDLLFKTNRKVTVKQLKEDYFKKIECFDSVEISGVEDRFNASLGTYHDLLKIIKDKDFLDNEENEDILEDIVLTLTLFEDREMIEERLKTYAHLFDDKVMKQLKRRRYTGWGRLSRKLINGIRDKQSGKTILDFLKSDGFANRNFMQLIHDDSLTFKEDIQKAQVSGQGDSLHEHIANLAGSPAIKKGILQTVKVVDELVKVMGRHKPENIVIEMARENQTTQKGQKNSRERMKRIEEGIKELGSQILKEHPVENTQLQNEKLYLYYLQNGRDMYVDQELDINRLSDYDVDAIVPQSFLKDDSIDNKVLTRSDKNRGKSDNVPSEEVVKKMKNYWRQLLNAKLITQRKFDNLTKAERGGLSELDKAGFIKRQLVETRQITKHVAQILDSRMNTKYDENDKLIREVKVITLKSKLVSDFRKDFQFYKVREINNYHHAHDAYLNAVVGTALIKKYPKLESEFVYGDYKVYDVRKMIAKSEQEIGKATAKYFFYSNIMNFFKTEITLANGEIRKRPLIETNGETGEIVWDKGRDFATVRKVLSMPQVNIVKKTEVQTGGFSKESILPKRNSDKLIARKKDWDPKKYGGFDSPTVAYSVLVVAKVEKGKSKKLKSVKELLGITIMERSSFEKNPIDFLEAKGYKEVKKDLIIKLPKYSLFELENGRKRMLASAGELQKGNELALPSKYVNFLYLASHYEKLKGSPEDNEQKQLFVEQHKHYLDEIIEQISEFSKRVILADANLDKVLSAYNKHRDKPIREQAENIIHLFTLTNLGAPAAFKYFDTTIDRKRYTSTKEVLDATLIHQSITGLYETRIDLSQLGGDNSKKRSLEDNETEIKVSRDTWNTKNMRSLEPPRSKKRIH

SEQ ID NO: 122 - protein, 1823 aa, Artificial Sequence
  chemically synthesized
MPKKKRKVSSCNTKKPNLDAELDQLLQGHYIKGYPKQYTYFLEDGKVKVSRPEGVKIIPPQSDRQKIVLQAHNLAHTGREATLLKIANLYWWPNMRKDVVKQLGRCQQCLITNASNKASGPILRPDRPQKPFDKFFIDYIGPLPPSQGYLYVLVVVDGMTGFTWLYPTKAPSTSATVKSLNVLTSIAIPKVIHSDQGAAFTSSTFAEWAKERGIHLEFSTPYHPQSGSKVERKNSDIKRLLTKLLVGRPTKWYDLLPVVQLALNNTYSPVLKYTPHQLLFGIDSNTPFANQDTLDLTREEELSLLQEIRTSLYHPSTPPASSRSWSPVVGQLVQERVARPASLRPRWHKPSTVLKVLNPRTVVILDHLGNNRTVSIDNLKPTSHQNGTTNDTATMDHLEKNEGGGGSGGGGSGGGGSDKKYSIGLAIGTNSVGWAVITDEYKVPSKKFKVLGNTDRHSIKKNLIGALLFDSGETAEATRLKRTARRRYTRRKNRICYLQEIFSNEMAKVDDSFFHRLEESFLVEEDKKHERHPIFGNIVDEVAYHEKYPTIYHLRKKLVDSTDKADLRLIYLALAHMIKFRGHFLIEGDLNPDNSDVDKLFIQLVQTYNQLFEENPINASGVDAKAILSARLSKSRRLENLIAQLPGEKKNGLFGNLIALSLGLTPNFKSNFDLAEDAKLQLSKDTYDDDLDNLLAQIGDQYADLFLAAKNLSDAILLSDILRVNTEITKAPLSASMIKRYDEHHQDLTLLKALVRQQLPEKYKEIFFDQSKNGYAGYIDGGASQEEFYKFIKPILEKMDGTEELLVKLNREDLLRKQRTFDNGSIPHQIHLGELHAILRRQEDFYPFLKDNREKIEKILTFRIPYYVGPLARGNSRFAWMTRKSEETITPWNFEEVVDKGASAQSFIERMTNFDKNLPNEKVLPKHSLLYEYFTVYNELTKVKYVTEGMRKPAFLSGEQKKAIVDLLFKTNRKVTVKQLKEDYFKKIECFDSVEISGVEDRFNASLGTYHDLLKIIKDKDFLDNEENEDILEDIVLTLTLFEDREMIEERLKTYAHLFDDKVMKQLKRRRYTGWGRLSRKLINGIRDKQSGKTILDFLKSDGFANRNFMQLIHDDSLTFKEDIQKAQVSGQGDSLHEHIANLAGSPAIKKGILQTVKVVDELVKVMGRHKPENIVIEMARENQTTQKGQKNSRERMKRIEEGIKELGSQILKEHPVENTQLQNEKLYLYYLQNGRDMYVDQELDINRLSDYDVDAIVPQSFLKDDSIDNKVLTRSDKNRGKSDNVPSEEVVKKMKNYWRQLLNAKLITQRKFDNLTKAERGGLSELDKAGFIKRQLVETRQITKHVAQILDSRMNTKYDENDKLIREVKVITLKSKLVSDFRKDFQFYKVREINNYHHAHDAYLNAVVGTALIKKYPKLESEFVYGDYKVYDVRKMIAKSEQEIGKATAKYFFYSNIMNFFKTEITLANGEIRKRPLIETNGETGEIVWDKGRDFATVRKVLSMPQVNIVKKTEVQTGGFSKESILPKRNSDKLIARKKDWDPKKYGGFDSPTVAYSVLVVAKVEKGKSKKLKSVKELLGITIMERSSFEKNPIDFLEAKGYKEVKKDLIIKLPKYSLFELENGRKRMLASAGELQKGNELALPSKYVNFLYLASHYEKLKGSPEDNEQKQLFVEQHKHYLDEIIEQISEFSKRVILADANLDKVLSAYNKHRDKPIREQAENIIHLFTLTNLGAPAAFKYFDTTIDRKRYTSTKEVLDATLIHQSITGLYETRIDLSQLGGDNSKKRSLEDNETEIKVSRDTWNTKNMRSLEPPRSKKRIH

SEQ ID NO: 123 - protein, 1747 aa, Artificial Sequence
  chemically synthesized
MPKKKRKVSSCNTKKPNLDAELDQLLQGHYIKGYPKQYTYFLEDGKVKVSRPEGVKIIPPQSDRQKIVLQAHNLAHTGREATLLKIANLYWWPNMRKDVVKQLGRCQQCLITNASNKASGPILRPDRPQKPFDKFFIDYIGPLPPSQGYLYVLVVVDGMTGFTWLYPTKAPSTSATVKSLNVLTSIAIPKVIHSDQGAAFTSSTFAEWAKERGIHLEFSTPYHPQSGSKVERKNSDIKRLLTKLLVGRPTKWYDLLPVVQLALNNTYSPVLKYTPHQLLFGIDSNTPFANQDTLDLTREEELSLLQEIRTSLYHPSTPPASSRSWSGGGGSGGGGSGGGGSDKKYSIGLAIGTNSVGWAVITDEYKVPSKKFKVLGNTDRHSIKKNLIGALLFDSGETAEATRLKRTARRRYTRRKNRICYLQEIFSNEMAKVDDSFFHRLEESFLVEEDKKHERHPIFGNIVDEVAYHEKYPTIYHLRKKLVDSTDKADLRLIYLALAHMIKFRGHFLIEGDLNPDNSDVDKLFIQLVQTYNQLFEENPINASGVDAKAILSARLSKSRRLENLIAQLPGEKKNGLFGNLIALSLGLTPNFKSNFDLAEDAKLQLSKDTYDDDLDNLLAQIGDQYADLFLAAKNLSDAILLSDILRVNTEITKAPLSASMIKRYDEHHQDLTLLKALVRQQLPEKYKEIFFDQSKNGYAGYIDGGASQEEFYKFIKPILEKMDGTEELLVKLNREDLLRKQRTFDNGSIPHQIHLGELHAILRRQEDFYPFLKDNREKIEKILTFRIPYYVGPLARGNSRFAWMTRKSEETITPWNFEEVVDKGASAQSFIERMTNFDKNLPNEKVLPKHSLLYEYFTVYNELTKVKYVTEGMRKPAFLSGEQKKAIVDLLFKTNRKVTVKQLKEDYFKKIECFDSVEISGVEDRFNASLGTYHDLLKIIKDKDFLDNEENEDILEDIVLTLTLFEDREMIEERLKTYAHLFDDKVMKQLKRRRYTGWGRLSRKLINGIRDKQSGKTILDFLKSDGFANRNFMQLIHDDSLTFKEDIQKAQVSGQGDSLHEHIANLAGSPAIKKGILQTVKVVDELVKVMGRHKPENIVIEMARENQTTQKGQKNSRERMKRIEEGIKELGSQILKEHPVENTQLQNEKLYLYYLQNGRDMYVDQELDINRLSDYDVDAIVPQSFLKDDSIDNKVLTRSDKNRGKSDNVPSEEVVKKMKNYWRQLLNAKLITQRKFDNLTKAERGGLSELDKAGFIKRQLVETRQITKHVAQILDSRMNTKYDENDKLIREVKVITLKSKLVSDFRKDFQFYKVREINNYHHAHDAYLNAVVGTALIKKYPKLESEFVYGDYKVYDVRKMIAKSEQEIGKATAKYFFYSNIMNFFKTEITLANGEIRKRPLIETNGETGEIVWDKGRDFATVRKVLSMPQVNIVKKTEVQTGGFSKESILPKRNSDKLIARKKDWDPKKYGGFDSPTVAYSVLVVAKVEKGKSKKLKSVKELLGITIMERSSFEKNPIDFLEAKGYKEVKKDLIIKLPKYSLFELENGRKRMLASAGELQKGNELALPSKYVNFLYLASHYEKLKGSPEDNEQKQLFVEQHKHYLDEIIEQISEFSKRVILADANLDKVLSAYNKHRDKPIREQAENIIHLFTLTNLGAPAAFKYFDTTIDRKRYTSTKEVLDATLIHQSITGLYETRIDLSQLGGDNSKKRSLEDNETEIKVSRDTWNTKNMRSLEPPRSKKRIH

SEQ ID NO: 124 - protein, 1708 aa, Artificial Sequence
  chemically synthesized
MPKKKRKVSSGSTGVFWVENIQEAQDEHENWHTSPKILARNYKIPLTVAKQITQECPHCTKQGSGPAGCVMRSPNHWQADCTHLDNKIILTFVESNSGYIHATLLSKENALCTSLAILEWARLFSPKSLHTDNGTNFVAEPVVNLLKFLKIAHTTGIPYHPESQGIVERANRTLKEKIQSHRDNTQTLEAALQLALITCNKGRESMGGQTPWEVFITNQAQVIHEKLLLQQAQSSKKFCFYKIPGEHDWKGPTRVLWKGDGAVVVNDEGKGIIAVPLTRTKLLIKPNGGGGSGGGGSGGGGSDKKYSIGLAIGTNSVGWAVITDEYKVPSKKFKVLGNTDRHSIKKNLIGALLFDSGETAEATRLKRTARRRYTRRKNRICYLQEIFSNEMAKVDDSFFHRLEESFLVEEDKKHERHPIFGNIVDEVAYHEKYPTIYHLRKKLVDSTDKADLRLIYLALAHMIKFRGHFLIEGDLNPDNSDVDKLFIQLVQTYNQLFEENPINASGVDAKAILSARLSKSRRLENLIAQLPGEKKNGLFGNLIALSLGLTPNFKSNFDLAEDAKLQLSKDTYDDDLDNLLAQIGDQYADLFLAAKNLSDAILLSDILRVNTEITKAPLSASMIKRYDEHHQDLTLLKALVRQQLPEKYKEIFFDQSKNGYAGYIDGGASQEEFYKFIKPILEKMDGTEELLVKLNREDLLRKQRTFDNGSIPHQIHLGELHAILRRQEDFYPFLKDNREKIEKILTFRIPYYVGPLARGNSRFAWMTRKSEETITPWNFEEVVDKGASAQSFIERMTNFDKNLPNEKVLPKHSLLYEYFTVYNELTKVKYVTEGMRKPAFLSGEQKKAIVDLLFKTNRKVTVKQLKEDYFKKIECFDSVEISGVEDRFNASLGTYHDLLKIIKDKDFLDNEENEDILEDIVLTLTLFEDREMIEERLKTYAHLFDDKVMKQLKRRRYTGWGRLSRKLINGIRDKQSGKTILDFLKSDGFANRNFMQLIHDDSLTFKEDIQKAQVSGQGDSLHEHIANLAGSPAIKKGILQTVKVVDELVKVMGRHKPENIVIEMARENQTTQKGQKNSRERMKRIEEGIKELGSQILKEHPVENTQLQNEKLYLYYLQNGRDMYVDQELDINRLSDYDVDAIVPQSFLKDDSIDNKVLTRSDKNRGKSDNVPSEEVVKKMKNYWRQLLNAKLITQRKFDNLTKAERGGLSELDKAGFIKRQLVETRQITKHVAQILDSRMNTKYDENDKLIREVKVITLKSKLVSDFRKDFQFYKVREINNYHHAHDAYLNAVVGTALIKKYPKLESEFVYGDYKVYDVRKMIAKSEQEIGKATAKYFFYSNIMNFFKTEITLANGEIRKRPLIETNGETGEIVWDKGRDFATVRKVLSMPQVNIVKKTEVQTGGFSKESILPKRNSDKLIARKKDWDPKKYGGFDSPTVAYSVLVVAKVEKGKSKKLKSVKELLGITIMERSSFEKNPIDFLEAKGYKEVKKDLIIKLPKYSLFELENGRKRMLASAGELQKGNELALPSKYVNFLYLASHYEKLKGSPEDNEQKQLFVEQHKHYLDEIIEQISEFSKRVILADANLDKVLSAYNKHRDKPIREQAENIIHLFTLTNLGAPAAFKYFDTTIDRKRYTSTKEVLDATLIHQSITGLYETRIDLSQLGGDNSKKRSLEDNETEIKVSRDTWNTKNMRSLEPPRSKKRIH

SEQ ID NO: 125 - protein, 1656 aa, Artificial Sequence
  chemically synthesized
MPKKKRKVSSGSTGVFWVENIQEAQDEHENWHTSPKILARNYKIPLTVAKQITQECPHCTKQGSGPAGCVMRSPNHWQADCTHLDNKIILTFVESNSGYIHATLLSKENALCTSLAILEWARLFSPKSLHTDNGTNFVAEPVVNLLKFLKIAHTTGIPYHPESQGIVERANRTLKEKIQSHRDNTQTLEAALQLALITCNKGRESMGGQTPWEVFITNQAQVIHEKLLLQQAQSSGGGGSGGGGSGGGGSDKKYSIGLAIGTNSVGWAVITDEYKVPSKKFKVLGNTDRHSIKKNLIGALLFDSGETAEATRLKRTARRRYTRRKNRICYLQEIFSNEMAKVDDSFFHRLEESFLVEEDKKHERHPIFGNIVDEVAYHEKYPTIYHLRKKLVDSTDKADLRLIYLALAHMIKFRGHFLIEGDLNPDNSDVDKLFIQLVQTYNQLFEENPINASGVDAKAILSARLSKSRRLENLIAQLPGEKKNGLFGNLIALSLGLTPNFKSNFDLAEDAKLQLSKDTYDDDLDNLLAQIGDQYADLFLAAKNLSDAILLSDILRVNTEITKAPLSASMIKRYDEHHQDLTLLKALVRQQLPEKYKEIFFDQSKNGYAGYIDGGASQEEFYKFIKPILEKMDGTEELLVKLNREDLLRKQRTFDNGSIPHQIHLGELHAILRRQEDFYPFLKDNREKIEKILTFRIPYYVGPLARGNSRFAWMTRKSEETITPWNFEEVVDKGASAQSFIERMTNFDKNLPNEKVLPKHSLLYEYFTVYNELTKVKYVTEGMRKPAFLSGEQKKAIVDLLFKTNRKVTVKQLKEDYFKKIECFDSVEISGVEDRFNASLGTYHDLLKIIKDKDFLDNEENEDILEDIVLTLTLFEDREMIEERLKTYAHLFDDKVMKQLKRRRYTGWGRLSRKLINGIRDKQSGKTILDFLKSDGFANRNFMQLIHDDSLTFKEDIQKAQVSGQGDSLHEHIANLAGSPAIKKGILQTVKVVDELVKVMGRHKPENIVIEMARENQTTQKGQKNSRERMKRIEEGIKELGSQILKEHPVENTQLQNEKLYLYYLQNGRDMYVDQELDINRLSDYDVDAIVPQSFLKDDSIDNKVLTRSDKNRGKSDNVPSEEVVKKMKNYWRQLLNAKLITQRKFDNLTKAERGGLSELDKAGFIKRQLVETRQITKHVAQILDSRMNTKYDENDKLIREVKVITLKSKLVSDFRKDFQFYKVREINNYHHAHDAYLNAVVGTALIKKYPKLESEFVYGDYKVYDVRKMIAKSEQEIGKATAKYFFYSNIMNFFKTEITLANGEIRKRPLIETNGETGEIVWDKGRDFATVRKVLSMPQVNIVKKTEVQTGGFSKESILPKRNSDKLIARKKDWDPKKYGGFDSPTVAYSVLVVAKVEKGKSKKLKSVKELLGITIMERSSFEKNPIDFLEAKGYKEVKKDLIIKLPKYSLFELENGRKRMLASAGELQKGNELALPSKYVNFLYLASHYEKLKGSPEDNEQKQLFVEQHKHYLDEIIEQISEFSKRVILADANLDKVLSAYNKHRDKPIREQAENIIHLFTLTNLGAPAAFKYFDTTIDRKRYTSTKEVLDATLIHQSITGLYETRIDLSQLGGDNSKKRSLEDNETEIKVSRDTWNTKNMRSLEPPRSKKRIH

SEQ ID NO: 126 - protein, 1839 aa, Artificial Sequence
  chemically synthesized
MPKKKRKVSSIENSSPYTSEHFHYTVTDIKDLTKLGAIYDKTKKYWVYQGKPVMPDQFTFELLDFLHQLTHLSFSKMKALLERSHSPYYMLNRDRTLKNITETCKACAQVNASKSAVKQGTRVRGHRPGTHWEIDFTEIKPGLYGYKYLLVFIDTFSGWIEAFPTKKETAKVVTKKLLEEIFPRFGMPQVLGTDNGPAFVSKVSQTVADLLGIDWKLHCAYRPQSSGQVERMNRTIKETLTKLTLATGSRDWVLLLPLALYRARNTPGPHGLTPYEILYGAPPPLVNFPDPDMTRVTNSPSLQAHLQALYLVQHEVWRPLAAAYQEQLDRPVVPHPYRVGDTVWVRRHQTKNLEPRWKGPYTVLLTTPTALKVDGIAAWIHAAHVKAADPGGGPSSRLTWRVQRSQNPLKIRLTREAPGGGGSGGGGSGGGGSDKKYSIGLAIGTNSVGWAVITDEYKVPSKKFKVLGNTDRHSIKKNLIGALLFDSGETAEATRLKRTARRRYTRRKNRICYLQEIFSNEMAKVDDSFFHRLEESFLVEEDKKHERHPIFGNIVDEVAYHEKYPTIYHLRKKLVDSTDKADLRLIYLALAHMIKFRGHFLIEGDLNPDNSDVDKLFIQLVQTYNQLFEENPINASGVDAKAILSARLSKSRRLENLIAQLPGEKKNGLFGNLIALSLGLTPNFKSNFDLAEDAKLQLSKDTYDDDLDNLLAQIGDQYADLFLAAKNLSDAILLSDILRVNTEITKAPLSASMIKRYDEHHQDLTLLKALVRQQLPEKYKEIFFDQSKNGYAGYIDGGASQEEFYKFIKPILEKMDGTEELLVKLNREDLLRKQRTFDNGSIPHQIHLGELHAILRRQEDFYPFLKDNREKIEKILTFRIPYYVGPLARGNSRFAWMTRKSEETITPWNFEEVVDKGASAQSFIERMTNFDKNLPNEKVLPKHSLLYEYFTVYNELTKVKYVTEGMRKPAFLSGEQKKAIVDLLFKTNRKVTVKQLKEDYFKKIECFDSVEISGVEDRFNASLGTYHDLLKIIKDKDFLDNEENEDILEDIVLTLTLFEDREMIEERLKTYAHLFDDKVMKQLKRRRYTGWGRLSRKLINGIRDKQSGKTILDFLKSDGFANRNFMQLIHDDSLTFKEDIQKAQVSGQGDSLHEHIANLAGSPAIKKGILQTVKVVDELVKVMGRHKPENIVIEMARENQTTQKGQKNSRERMKRIEEGIKELGSQILKEHPVENTQLQNEKLYLYYLQNGRDMYVDQELDINRLSDYDVDAIVPQSFLKDDSIDNKVLTRSDKNRGKSDNVPSEEVVKKMKNYWRQLLNAKLITQRKFDNLTKAERGGLSELDKAGFIKRQLVETRQITKHVAQILDSRMNTKYDENDKLIREVKVITLKSKLVSDFRKDFQFYKVREINNYHHAHDAYLNAVVGTALIKKYPKLESEFVYGDYKVYDVRKMIAKSEQEIGKATAKYFFYSNIMNFFKTEITLANGEIRKRPLIETNGETGEIVWDKGRDFATVRKVLSMPQVNIVKKTEVQTGGFSKESILPKRNSDKLIARKKDWDPKKYGGFDSPTVAYSVLVVAKVEKGKSKKLKSVKELLGITIMERSSFEKNPIDFLEAKGYKEVKKDLIIKLPKYSLFELENGRKRMLASAGELQKGNELALPSKYVNFLYLASHYEKLKGSPEDNEQKQLFVEQHKHYLDEIIEQISEFSKRVILADANLDKVLSAYNKHRDKPIREQAENIIHLFTLTNLGAPAAFKYFDTTIDRKRYTSTKEVLDATLIHQSITGLYETRIDLSQLGGDNSKKRSLEDNETEIKVSRDTWNTKNMRSLEPPRSKKRIH

SEQ ID NO: 127 - protein, 1757 aa, Artificial Sequence
  chemically synthesized
MPKKKRKVSSIENSSPYTSEHFHYTVTDIKDLTKLGAIYDKTKKYWVYQGKPVMPDQFTFELLDFLHQLTHLSFSKMKALLERSHSPYYMLNRDRTLKNITETCKACAQVNASKSAVKQGTRVRGHRPGTHWEIDFTEIKPGLYGYKYLLVFIDTFSGWIEAFPTKKETAKVVTKKLLEEIFPRFGMPQVLGTDNGPAFVSKVSQTVADLLGIDWKLHCAYRPQSSGQVERMNRTIKETLTKLTLATGSRDWVLLLPLALYRARNTPGPHGLTPYEILYGAPPPLVNFPDPDMTRVTNSPSLQAHLQALYLVQHEVWRPLAAAYQEQLDRPVVPHPGGGGSGGGGSGGGGSDKKYSIGLAIGTNSVGWAVITDEYKVPSKKFKVLGNTDRHSIKKNLIGALLFDSGETAEATRLKRTARRRYTRRKNRICYLQEIFSNEMAKVDDSFFHRLEESFLVEEDKKHERHPIFGNIVDEVAYHEKYPTIYHLRKKLVDSTDKADLRLIYLALAHMIKFRGHFLIEGDLNPDNSDVDKLFIQLVQTYNQLFEENPINASGVDAKAILSARLSKSRRLENLIAQLPGEKKNGLFGNLIALSLGLTPNFKSNFDLAEDAKLQLSKDTYDDDLDNLLAQIGDQYADLFLAAKNLSDAILLSDILRVNTEITKAPLSASMIKRYDEHHQDLTLLKALVRQQLPEKYKEIFFDQSKNGYAGYIDGGASQEEFYKFIKPILEKMDGTEELLVKLNREDLLRKQRTFDNGSIPHQIHLGELHAILRRQEDFYPFLKDNREKIEKILTFRIPYYVGPLARGNSRFAWMTRKSEETITPWNFEEVVDKGASAQSFIERMTNFDKNLPNEKVLPKHSLLYEYFTVYNELTKVKYVTEGMRKPAFLSGEQKKAIVDLLFKTNRKVTVKQLKEDYFKKIECFDSVEISGVEDRFNASLGTYHDLLKIIKDKDFLDNEENEDILEDIVLTLTLFEDREMIEERLKTYAHLFDDKVMKQLKRRRYTGWGRLSRKLINGIRDKQSGKTILDFLKSDGFANRNFMQLIHDDSLTFKEDIQKAQVSGQGDSLHEHIANLAGSPAIKKGILQTVKVVDELVKVMGRHKPENIVIEMARENQTTQKGQKNSRERMKRIEEGIKELGSQILKEHPVENTQLQNEKLYLYYLQNGRDMYVDQELDINRLSDYDVDAIVPQSFLKDDSIDNKVLTRSDKNRGKSDNVPSEEVVKKMKNYWRQLLNAKLITQRKFDNLTKAERGGLSELDKAGFIKRQLVETRQITKHVAQILDSRMNTKYDENDKLIREVKVITLKSKLVSDFRKDFQFYKVREINNYHHAHDAYLNAVVGTALIKKYPKLESEFVYGDYKVYDVRKMIAKSEQEIGKATAKYFFYSNIMNFFKTEITLANGEIRKRPLIETNGETGEIVWDKGRDFATVRKVLSMPQVNIVKKTEVQTGGFSKESILPKRNSDKLIARKKDWDPKKYGGFDSPTVAYSVLVVAKVEKGKSKKLKSVKELLGITIMERSSFEKNPIDFLEAKGYKEVKKDLIIKLPKYSLFELENGRKRMLASAGELQKGNELALPSKYVNFLYLASHYEKLKGSPEDNEQKQLFVEQHKHYLDEIIEQISEFSKRVILADANLDKVLSAYNKHRDKPIREQAENIIHLFTLTNLGAPAAFKYFDTTIDRKRYTSTKEVLDATLIHQSITGLYETRIDLSQLGGDNSKKRSLEDNETEIKVSRDTWNTKNMRSLEPPRSKKRIH

SEQ ID NO: 128 - protein, 1749 aa, Artificial Sequence
  chemically synthesized
MPKKKRKVSSLESAQESHALHHQNAAALRFQFHITREQAREIVKLCPNCPDWGHAPQLGVNPRGLKPRVLWQMDVTHVSEFGKLKYVHVTVDTYSHFTFATARTGEATKDVLQHLAQSFAYMGIPQKIKTDNAPAYVSRSIQEFLARWKISHVTGIPYNPQGQAIVERTHQNIKAQLNKLQKAGKYYTPHHLLAHALFVLNHVNMDNQGHTAAERHWGPISADPKPMVMWKDLLTGSWKGPDVLITAGRGYACVFPQDAETPIWVPDRFIRPFTERKEATPTPGTAEKTPPRDEKDQQESPKNESSPHQREDGLATSAGVDLRSGGGPGGGGSGGGGSGGGGSDKKYSIGLAIGTNSVGWAVITDEYKVPSKKFKVLGNTDRHSIKKNLIGALLFDSGETAEATRLKRTARRRYTRRKNRICYLQEIFSNEMAKVDDSFFHRLEESFLVEEDKKHERHPIFGNIVDEVAYHEKYPTIYHLRKKLVDSTDKADLRLIYLALAHMIKFRGHFLIEGDLNPDNSDVDKLFIQLVQTYNQLFEENPINASGVDAKAILSARLSKSRRLENLIAQLPGEKKNGLFGNLIALSLGLTPNFKSNFDLAEDAKLQLSKDTYDDDLDNLLAQIGDQYADLFLAAKNLSDAILLSDILRVNTEITKAPLSASMIKRYDEHHQDLTLLKALVRQQLPEKYKEIFFDQSKNGYAGYIDGGASQEEFYKFIKPILEKMDGTEELLVKLNREDLLRKQRTFDNGSIPHQIHLGELHAILRRQEDFYPFLKDNREKIEKILTFRIPYYVGPLARGNSRFAWMTRKSEETITPWNFEEVVDKGASAQSFIERMTNFDKNLPNEKVLPKHSLLYEYFTVYNELTKVKYVTEGMRKPAFLSGEQKKAIVDLLFKTNRKVTVKQLKEDYFKKIECFDSVEISGVEDRFNASLGTYHDLLKIIKDKDFLDNEENEDILEDIVLTLTLFEDREMIEERLKTYAHLFDDKVMKQLKRRRYTGWGRLSRKLINGIRDKQSGKTILDFLKSDGFANRNFMQLIHDDSLTFKEDIQKAQVSGQGDSLHEHIANLAGSPAIKKGILQTVKVVDELVKVMGRHKPENIVIEMARENQTTQKGQKNSRERMKRIEEGIKELGSQILKEHPVENTQLQNEKLYLYYLQNGRDMYVDQELDINRLSDYDVDAIVPQSFLKDDSIDNKVLTRSDKNRGKSDNVPSEEVVKKMKNYWRQLLNAKLITQRKFDNLTKAERGGLSELDKAGFIKRQLVETRQITKHVAQILDSRMNTKYDENDKLIREVKVITLKSKLVSDFRKDFQFYKVREINNYHHAHDAYLNAVVGTALIKKYPKLESEFVYGDYKVYDVRKMIAKSEQEIGKATAKYFFYSNIMNFFKTEITLANGEIRKRPLIETNGETGEIVWDKGRDFATVRKVLSMPQVNIVKKTEVQTGGFSKESILPKRNSDKLIARKKDWDPKKYGGFDSPTVAYSVLVVAKVEKGKSKKLKSVKELLGITIMERSSFEKNPIDFLEAKGYKEVKKDLIIKLPKYSLFELENGRKRMLASAGELQKGNELALPSKYVNFLYLASHYEKLKGSPEDNEQKQLFVEQHKHYLDEIIEQISEFSKRVILADANLDKVLSAYNKHRDKPIREQAENIIHLFTLTNLGAPAAFKYFDTTIDRKRYTSTKEVLDATLIHQSITGLYETRIDLSQLGGDNSKKRSLEDNETEIKVSRDTWNTKNMRSLEPPRSKKRIH

SEQ ID NO: 129 - protein, 1643 aa, Artificial Sequence
  chemically synthesized
MPKKKRKVSSLESAQESHALHHQNAAALRFQFHITREQAREIVKLCPNCPDWGHAPQLGVNPRGLKPRVLWQMDVTHVSEFGKLKYVHVTVDTYSHFTFATARTGEATKDVLQHLAQSFAYMGIPQKIKTDNAPAYVSRSIQEFLARWKISHVTGIPYNPQGQAIVERTHQNIKAQLNKLQKAGKYYTPHHLLAHALFVLNHVNMDNQGHTAAERHWGPISAGGGGSGGGGSGGGGSDKKYSIGLAIGTNSVGWAVITDEYKVPSKKFKVLGNTDRHSIKKNLIGALLFDSGETAEATRLKRTARRRYTRRKNRICYLQEIFSNEMAKVDDSFFHRLEESFLVEEDKKHERHPIFGNIVDEVAYHEKYPTIYHLRKKLVDSTDKADLRLIYLALAHMIKFRGHFLIEGDLNPDNSDVDKLFIQLVQTYNQLFEENPINASGVDAKAILSARLSKSRRLENLIAQLPGEKKNGLFGNLIALSLGLTPNFKSNFDLAEDAKLQLSKDTYDDDLDNLLAQIGDQYADLFLAAKNLSDAILLSDILRVNTEITKAPLSASMIKRYDEHHQDLTLLKALVRQQLPEKYKEIFFDQSKNGYAGYIDGGASQEEFYKFIKPILEKMDGTEELLVKLNREDLLRKQRTFDNGSIPHQIHLGELHAILRRQEDFYPFLKDNREKIEKILTFRIPYYVGPLARGNSRFAWMTRKSEETITPWNFEEVVDKGASAQSFIERMTNFDKNLPNEKVLPKHSLLYEYFTVYNELTKVKYVTEGMRKPAFLSGEQKKAIVDLLFKTNRKVTVKQLKEDYFKKIECFDSVEISGVEDRFNASLGTYHDLLKIIKDKDFLDNEENEDILEDIVLTLTLFEDREMIEERLKTYAHLFDDKVMKQLKRRRYTGWGRLSRKLINGIRDKQSGKTILDFLKSDGFANRNFMQLIHDDSLTFKEDIQKAQVSGQGDSLHEHIANLAGSPAIKKGILQTVKVVDELVKVMGRHKPENIVIEMARENQTTQKGQKNSRERMKRIEEGIKELGSQILKEHPVENTQLQNEKLYLYYLQNGRDMYVDQELDINRLSDYDVDAIVPQSFLKDDSIDNKVLTRSDKNRGKSDNVPSEEVVKKMKNYWRQLLNAKLITQRKFDNLTKAERGGLSELDKAGFIKRQLVETRQITKHVAQILDSRMNTKYDENDKLIREVKVITLKSKLVSDFRKDFQFYKVREINNYHHAHDAYLNAVVGTALIKKYPKLESEFVYGDYKVYDVRKMIAKSEQEIGKATAKYFFYSNIMNFFKTEITLANGEIRKRPLIETNGETGEIVWDKGRDFATVRKVLSMPQVNIVKKTEVQTGGFSKESILPKRNSDKLIARKKDWDPKKYGGFDSPTVAYSVLVVAKVEKGKSKKLKSVKELLGITIMERSSFEKNPIDFLEAKGYKEVKKDLIIKLPKYSLFELENGRKRMLASAGELQKGNELALPSKYVNFLYLASHYEKLKGSPEDNEQKQLFVEQHKHYLDEIIEQISEFSKRVILADANLDKVLSAYNKHRDKPIREQAENIIHLFTLTNLGAPAAFKYFDTTIDRKRYTSTKEVLDATLIHQSITGLYETRIDLSQLGGDNSKKRSLEDNETEIKVSRDTWNTKNMRSLEPPRSKKRIH

SEQ ID NO: 130 - protein, 1811 aa, Artificial Sequence
  chemically synthesized
MPKKKRKVSSVLKKGDALASTDLVMEYSETDEKFTAGAELHDGVFMRGDLIVPPLEMLHAILLAIHGVSHTHKGGIMSYFSKFWTHPKASQTIDLILGHCQICLKHNPKYKSRLQGHRPLPSRPFAHLQIDFVQMCVKKPMYALVIIDVFSKWPEIIPCNKEDAKTVCDILMKDIIPRWGLPDQIDSDQGTHFTAKISQELTHSIGVAWKLHCPGHPRSSGIVERTNRTLKSKIIKAQEQLQLSKWTEVLPYVLLEMRATPKKHGLSPHEIVMGRPMKTTYLSDMSPLWATDTLVTYMNKLTRQLSAYHQQVVDQWPSTSLPPGPEPGSWCMLRNPKKSSNWEGPFLILLSTPTAVKVEGRPTWIHLDHCKLLRSSLSSSLGGPVNQLLSGGGGSGGGGSGGGGSDKKYSIGLAIGTNSVGWAVITDEYKVPSKKFKVLGNTDRHSIKKNLIGALLFDSGETAEATRLKRTARRRYTRRKNRICYLQEIFSNEMAKVDDSFFHRLEESFLVEEDKKHERHPIFGNIVDEVAYHEKYPTIYHLRKKLVDSTDKADLRLIYLALAHMIKFRGHFLIEGDLNPDNSDVDKLFIQLVQTYNQLFEENPINASGVDAKAILSARLSKSRRLENLIAQLPGEKKNGLFGNLIALSLGLTPNFKSNFDLAEDAKLQLSKDTYDDDLDNLLAQIGDQYADLFLAAKNLSDAILLSDILRVNTEITKAPLSASMIKRYDEHHQDLTLLKALVRQQLPEKYKEIFFDQSKNGYAGYIDGGASQEEFYKFIKPILEKMDGTEELLVKLNREDLLRKQRTFDNGSIPHQIHLGELHAILRRQEDFYPFLKDNREKIEKILTFRIPYYVGPLARGNSRFAWMTRKSEETITPWNFEEVVDKGASAQSFIERMTNFDKNLPNEKVLPKHSLLYEYFTVYNELTKVKYVTEGMRKPAFLSGEQKKAIVDLLFKTNRKVTVKQLKEDYFKKIECFDSVEISGVEDRFNASLGTYHDLLKIIKDKDFLDNEENEDILEDIVLTLTLFEDREMIEERLKTYAHLFDDKVMKQLKRRRYTGWGRLSRKLINGIRDKQSGKTILDFLKSDGFANRNFMQLIHDDSLTFKEDIQKAQVSGQGDSLHEHIANLAGSPAIKKGILQTVKVVDELVKVMGRHKPENIVIEMARENQTTQKGQKNSRERMKRIEEGIKELGSQILKEHPVENTQLQNEKLYLYYLQNGRDMYVDQELDINRLSDYDVDAIVPQSFLKDDSIDNKVLTRSDKNRGKSDNVPSEEVVKKMKNYWRQLLNAKLITQRKFDNLTKAERGGLSELDKAGFIKRQLVETRQITKHVAQILDSRMNTKYDENDKLIREVKVITLKSKLVSDFRKDFQFYKVREINNYHHAHDAYLNAVVGTALIKKYPKLESEFVYGDYKVYDVRKMIAKSEQEIGKATAKYFFYSNIMNFFKTEITLANGEIRKRPLIETNGETGEIVWDKGRDFATVRKVLSMPQVNIVKKTEVQTGGFSKESILPKRNSDKLIARKKDWDPKKYGGFDSPTVAYSVLVVAKVEKGKSKKLKSVKELLGITIMERSSFEKNPIDFLEAKGYKEVKKDLIIKLPKYSLFELENGRKRMLASAGELQKGNELALPSKYVNFLYLASHYEKLKGSPEDNEQKQLFVEQHKHYLDEIIEQISEFSKRVILADANLDKVLSAYNKHRDKPIREQAENIIHLFTLTNLGAPAAFKYFDTTIDRKRYTSTKEVLDATLIHQSITGLYETRIDLSQLGGDNSKKRSLEDNETEIKVSRDTWNTKNMRSLEPPRSKKRIH

SEQ ID NO: 131 - protein, 1742 aa, Artificial Sequence
  chemically synthesized
MPKKKRKVSSVLKKGDALASTDLVMEYSETDEKFTAGAELHDGVFMRGDLIVPPLEMLHAILLAIHGVSHTHKGGIMSYFSKFWTHPKASQTIDLILGHCQICLKHNPKYKSRLQGHRPLPSRPFAHLQIDFVQMCVKKPMYALVIIDVFSKWPEIIPCNKEDAKTVCDILMKDIIPRWGLPDQIDSDQGTHFTAKISQELTHSIGVAWKLHCPGHPRSSGIVERTNRTLKSKIIKAQEQLQLSKWTEVLPYVLLEMRATPKKHGLSPHEIVMGRPMKTTYLSDMSPLWATDTLVTYMNKLTRQLSAYHQQVVDQWPSTSLGGGGSGGGGSGGGGSDKKYSIGLAIGTNSVGWAVITDEYKVPSKKFKVLGNTDRHSIKKNLIGALLFDSGETAEATRLKRTARRRYTRRKNRICYLQEIFSNEMAKVDDSFFHRLEESFLVEEDKKHERHPIFGNIVDEVAYHEKYPTIYHLRKKLVDSTDKADLRLIYLALAHMIKFRGHFLIEGDLNPDNSDVDKLFIQLVQTYNQLFEENPINASGVDAKAILSARLSKSRRLENLIAQLPGEKKNGLFGNLIALSLGLTPNFKSNFDLAEDAKLQLSKDTYDDDLDNLLAQIGDQYADLFLAAKNLSDAILLSDILRVNTEITKAPLSASMIKRYDEHHQDLTLLKALVRQQLPEKYKEIFFDQSKNGYAGYIDGGASQEEFYKFIKPILEKMDGTEELLVKLNREDLLRKQRTFDNGSIPHQIHLGELHAILRRQEDFYPFLKDNREKIEKILTFRIPYYVGPLARGNSRFAWMTRKSEETITPWNFEEVVDKGASAQSFIERMTNFDKNLPNEKVLPKHSLLYEYFTVYNELTKVKYVTEGMRKPAFLSGEQKKAIVDLLFKTNRKVTVKQLKEDYFKKIECFDSVEISGVEDRFNASLGTYHDLLKIIKDKDFLDNEENEDILEDIVLTLTLFEDREMIEERLKTYAHLFDDKVMKQLKRRRYTGWGRLSRKLINGIRDKQSGKTILDFLKSDGFANRNFMQLIHDDSLTFKEDIQKAQVSGQGDSLHEHIANLAGSPAIKKGILQTVKVVDELVKVMGRHKPENIVIEMARENQTTQKGQKNSRERMKRIEEGIKELGSQILKEHPVENTQLQNEKLYLYYLQNGRDMYVDQELDINRLSDYDVDAIVPQSFLKDDSIDNKVLTRSDKNRGKSDNVPSEEVVKKMKNYWRQLLNAKLITQRKFDNLTKAERGGLSELDKAGFIKRQLVETRQITKHVAQILDSRMNTKYDENDKLIREVKVITLKSKLVSDFRKDFQFYKVREINNYHHAHDAYLNAVVGTALIKKYPKLESEFVYGDYKVYDVRKMIAKSEQEIGKATAKYFFYSNIMNFFKTEITLANGEIRKRPLIETNGETGEIVWDKGRDFATVRKVLSMPQVNIVKKTEVQTGGFSKESILPKRNSDKLIARKKDWDPKKYGGFDSPTVAYSVLVVAKVEKGKSKKLKSVKELLGITIMERSSFEKNPIDFLEAKGYKEVKKDLIIKLPKYSLFELENGRKRMLASAGELQKGNELALPSKYVNFLYLASHYEKLKGSPEDNEQKQLFVEQHKHYLDEIIEQISEFSKRVILADANLDKVLSAYNKHRDKPIREQAENIIHLFTLTNLGAPAAFKYFDTTIDRKRYTSTKEVLDATLIHQSITGLYETRIDLSQLGGDNSKKRSLEDNETEIKVSRDTWNTKNMRSLEPPRSKKRIH

SEQ ID NO: 132 - protein, 1727 aa, Artificial Sequence
  chemically synthesized
MPKKKRKVSSLPLETPEQWHKLTHCNSRALSRWPNPRISAWDPRSPATLCETCQKLNPTGGGKMRTIQRGWAPNHIWQADITHYKYKQFTYALHVFVDTYSGATHASAKRGLTTQMTIEGLLEAIVHLGRPKKLNTDQGANYTSKTFVRFCQQFGVSLSHHVPYNPTSSGLVERTNGLLKLLLSKYHLDEPHLPMTQALSRALWTHNQINLLPILKTRWELHHSPPLAVISEGGETPKGSDKLFLYKLPGQNNRRWLGPLPALVEASGGALLATDPPVWVPWRLLKAFKCLKNDGPEDAHNRSSDGGGGGSGGGGSGGGGSDKKYSIGLAIGTNSVGWAVITDEYKVPSKKFKVLGNTDRHSIKKNLIGALLFDSGETAEATRLKRTARRRYTRRKNRICYLQEIFSNEMAKVDDSFFHRLEESFLVEEDKKHERHPIFGNIVDEVAYHEKYPTIYHLRKKLVDSTDKADLRLIYLALAHMIKFRGHFLIEGDLNPDNSDVDKLFIQLVQTYNQLFEENPINASGVDAKAILSARLSKSRRLENLIAQLPGEKKNGLFGNLIALSLGLTPNFKSNFDLAEDAKLQLSKDTYDDDLDNLLAQIGDQYADLFLAAKNLSDAILLSDILRVNTEITKAPLSASMIKRYDEHHQDLTLLKALVRQQLPEKYKEIFFDQSKNGYAGYIDGGASQEEFYKFIKPILEKMDGTEELLVKLNREDLLRKQRTFDNGSIPHQIHLGELHAILRRQEDFYPFLKDNREKIEKILTFRIPYYVGPLARGNSRFAWMTRKSEETITPWNFEEVVDKGASAQSFIERMTNFDKNLPNEKVLPKHSLLYEYFTVYNELTKVKYVTEGMRKPAFLSGEQKKAIVDLLFKTNRKVTVKQLKEDYFKKIECFDSVEISGVEDRFNASLGTYHDLLKIIKDKDFLDNEENEDILEDIVLTLTLFEDREMIEERLKTYAHLFDDKVMKQLKRRRYTGWGRLSRKLINGIRDKQSGKTILDFLKSDGFANRNFMQLIHDDSLTFKEDIQKAQVSGQGDSLHEHIANLAGSPAIKKGILQTVKVVDELVKVMGRHKPENIVIEMARENQTTQKGQKNSRERMKRIEEGIKELGSQILKEHPVENTQLQNEKLYLYYLQNGRDMYVDQELDINRLSDYDVDAIVPQSFLKDDSIDNKVLTRSDKNRGKSDNVPSEEVVKKMKNYWRQLLNAKLITQRKFDNLTKAERGGLSELDKAGFIKRQLVETRQITKHVAQILDSRMNTKYDENDKLIREVKVITLKSKLVSDFRKDFQFYKVREINNYHHAHDAYLNAVVGTALIKKYPKLESEFVYGDYKVYDVRKMIAKSEQEIGKATAKYFFYSNIMNFFKTEITLANGEIRKRPLIETNGETGEIVWDKGRDFATVRKVLSMPQVNIVKKTEVQTGGFSKESILPKRNSDKLIARKKDWDPKKYGGFDSPTVAYSVLVVAKVEKGKSKKLKSVKELLGITIMERSSFEKNPIDFLEAKGYKEVKKDLIIKLPKYSLFELENGRKRMLASAGELQKGNELALPSKYVNFLYLASHYEKLKGSPEDNEQKQLFVEQHKHYLDEIIEQISEFSKRVILADANLDKVLSAYNKHRDKPIREQAENIIHLFTLTNLGAPAAFKYFDTTIDRKRYTSTKEVLDATLIHQSITGLYETRIDLSQLGGDNSKKRSLEDNETEIKVSRDTWNTKNMRSLEPPRSKKRIH

SEQ ID NO: 133 - protein, 1658 aa, Artificial Sequence
  chemically synthesized
MPKKKRKVSSLPLETPEQWHKLTHCNSRALSRWPNPRISAWDPRSPATLCETCQKLNPTGGGKMRTIQRGWAPNHIWQADITHYKYKQFTYALHVFVDTYSGATHASAKRGLTTQMTIEGLLEAIVHLGRPKKLNTDQGANYTSKTFVRFCQQFGVSLSHHVPYNPTSSGLVERTNGLLKLLLSKYHLDEPHLPMTQALSRALWTHNQINLLPILKTRWELHHSPPLAVISEGGETPGGGGSGGGGSGGGGSDKKYSIGLAIGTNSVGWAVITDEYKVPSKKFKVLGNTDRHSIKKNLIGALLFDSGETAEATRLKRTARRRYTRRKNRICYLQEIFSNEMAKVDDSFFHRLEESFLVEEDKKHERHPIFGNIVDEVAYHEKYPTIYHLRKKLVDSTDKADLRLIYLALAHMIKFRGHFLIEGDLNPDNSDVDKLFIQLVQTYNQLFEENPINASGVDAKAILSARLSKSRRLENLIAQLPGEKKNGLFGNLIALSLGLTPNFKSNFDLAEDAKLQLSKDTYDDDLDNLLAQIGDQYADLFLAAKNLSDAILLSDILRVNTEITKAPLSASMIKRYDEHHQDLTLLKALVRQQLPEKYKEIFFDQSKNGYAGYIDGGASQEEFYKFIKPILEKMDGTEELLVKLNREDLLRKQRTFDNGSIPHQIHLGELHAILRRQEDFYPFLKDNREKIEKILTFRIPYYVGPLARGNSRFAWMTRKSEETITPWNFEEVVDKGASAQSFIERMTNFDKNLPNEKVLPKHSLLYEYFTVYNELTKVKYVTEGMRKPAFLSGEQKKAIVDLLFKTNRKVTVKQLKEDYFKKIECFDSVEISGVEDRFNASLGTYHDLLKIIKDKDFLDNEENEDILEDIVLTLTLFEDREMIEERLKTYAHLFDDKVMKQLKRRRYTGWGRLSRKLINGIRDKQSGKTILDFLKSDGFANRNFMQLIHDDSLTFKEDIQKAQVSGQGDSLHEHIANLAGSPAIKKGILQTVKVVDELVKVMGRHKPENIVIEMARENQTTQKGQKNSRERMKRIEEGIKELGSQILKEHPVENTQLQNEKLYLYYLQNGRDMYVDQELDINRLSDYDVDAIVPQSFLKDDSIDNKVLTRSDKNRGKSDNVPSEEVVKKMKNYWRQLLNAKLITQRKFDNLTKAERGGLSELDKAGFIKRQLVETRQITKHVAQILDSRMNTKYDENDKLIREVKVITLKSKLVSDFRKDFQFYKVREINNYHHAHDAYLNAVVGTALIKKYPKLESEFVYGDYKVYDVRKMIAKSEQEIGKATAKYFFYSNIMNFFKTEITLANGEIRKRPLIETNGETGEIVWDKGRDFATVRKVLSMPQVNIVKKTEVQTGGFSKESILPKRNSDKLIARKKDWDPKKYGGFDSPTVAYSVLVVAKVEKGKSKKLKSVKELLGITIMERSSFEKNPIDFLEAKGYKEVKKDLIIKLPKYSLFELENGRKRMLASAGELQKGNELALPSKYVNFLYLASHYEKLKGSPEDNEQKQLFVEQHKHYLDEIIEQISEFSKRVILADANLDKVLSAYNKHRDKPIREQAENIIHLFTLTNLGAPAAFKYFDTTIDRKRYTSTKEVLDATLIHQSITGLYETRIDLSQLGGDNSKKRSLEDNETEIKVSRDTWNTKNMRSLEPPRSKKRIH

SEQ ID NO: 134 - protein, 1724 aa, Artificial Sequence
  chemically synthesized
MPKKKRKVSSFLEKIEPAQEEHDKYHSNVKELVFKFGLPRIVARQIVDTCDKCHQKGEAIHGQANSDLGTWQMDCTHLEGKIIIVAVHVASGFIEAEVIPQETGRQTALFLLKLAGRWPITHLHTDNGANFASQEVKMVAWWAGIEHTFGVPYNPQSQGVVEAMNHHLKNQIDRIREQANSVETIVLMAVHCMNFKRRGGIGDMTPAERLINMITTEQEIQFQQSKNSKFKNFRVYYREGRDQLWKGPGELLWKGEGAVILKVGTDIKVVPRRKAKIIKDYGGGKEVDSSSHMEDTGEAREVAGGGGSGGGGSGGGGSDKKYSIGLAIGTNSVGWAVITDEYKVPSKKFKVLGNTDRHSIKKNLIGALLFDSGETAEATRLKRTARRRYTRRKNRICYLQEIFSNEMAKVDDSFFHRLEESFLVEEDKKHERHPIFGNIVDEVAYHEKYPTIYHLRKKLVDSTDKADLRLIYLALAHMIKFRGHFLIEGDLNPDNSDVDKLFIQLVQTYNQLFEENPINASGVDAKAILSARLSKSRRLENLIAQLPGEKKNGLFGNLIALSLGLTPNFKSNFDLAEDAKLQLSKDTYDDDLDNLLAQIGDQYADLFLAAKNLSDAILLSDILRVNTEITKAPLSASMIKRYDEHHQDLTLLKALVRQQLPEKYKEIFFDQSKNGYAGYIDGGASQEEFYKFIKPILEKMDGTEELLVKLNREDLLRKQRTFDNGSIPHQIHLGELHAILRRQEDFYPFLKDNREKIEKILTFRIPYYVGPLARGNSRFAWMTRKSEETITPWNFEEVVDKGASAQSFIERMTNFDKNLPNEKVLPKHSLLYEYFTVYNELTKVKYVTEGMRKPAFLSGEQKKAIVDLLFKTNRKVTVKQLKEDYFKKIECFDSVEISGVEDRFNASLGTYHDLLKIIKDKDFLDNEENEDILEDIVLTLTLFEDREMIEERLKTYAHLFDDKVMKQLKRRRYTGWGRLSRKLINGIRDKQSGKTILDFLKSDGFANRNFMQLIHDDSLTFKEDIQKAQVSGQGDSLHEHIANLAGSPAIKKGILQTVKVVDELVKVMGRHKPENIVIEMARENQTTQKGQKNSRERMKRIEEGIKELGSQILKEHPVENTQLQNEKLYLYYLQNGRDMYVDQELDINRLSDYDVDAIVPQSFLKDDSIDNKVLTRSDKNRGKSDNVPSEEVVKKMKNYWRQLLNAKLITQRKFDNLTKAERGGLSELDKAGFIKRQLVETRQITKHVAQILDSRMNTKYDENDKLIREVKVITLKSKLVSDFRKDFQFYKVREINNYHHAHDAYLNAVVGTALIKKYPKLESEFVYGDYKVYDVRKMIAKSEQEIGKATAKYFFYSNIMNFFKTEITLANGEIRKRPLIETNGETGEIVWDKGRDFATVRKVLSMPQVNIVKKTEVQTGGFSKESILPKRNSDKLIARKKDWDPKKYGGFDSPTVAYSVLVVAKVEKGKSKKLKSVKELLGITIMERSSFEKNPIDFLEAKGYKEVKKDLIIKLPKYSLFELENGRKRMLASAGELQKGNELALPSKYVNFLYLASHYEKLKGSPEDNEQKQLFVEQHKHYLDEIIEQISEFSKRVILADANLDKVLSAYNKHRDKPIREQAENIIHLFTLTNLGAPAAFKYFDTTIDRKRYTSTKEVLDATLIHQSITGLYETRIDLSQLGGDNSKKRSLEDNETEIKVSRDTWNTKNMRSLEPPRSKKRIH

SEQ ID NO: 135 - protein, 1653 aa, Artificial Sequence
  chemically synthesized
MPKKKRKVSSFLEKIEPAQEEHDKYHSNVKELVFKFGLPRIVARQIVDTCDKCHQKGEAIHGQANSDLGTWQMDCTHLEGKIIIVAVHVASGFIEAEVIPQETGRQTALFLLKLAGRWPITHLHTDNGANFASQEVKMVAWWAGIEHTFGVPYNPQSQGVVEAMNHHLKNQIDRIREQANSVETIVLMAVHCMNFKRRGGIGDMTPAERLINMITTEQEIQFQQSKNSKFKNGGGGSGGGGSGGGGSDKKYSIGLAIGTNSVGWAVITDEYKVPSKKFKVLGNTDRHSIKKNLIGALLFDSGETAEATRLKRTARRRYTRRKNRICYLQEIFSNEMAKVDDSFFHRLEESFLVEEDKKHERHPIFGNIVDEVAYHEKYPTIYHLRKKLVDSTDKADLRLIYLALAHMIKFRGHFLIEGDLNPDNSDVDKLFIQLVQTYNQLFEENPINASGVDAKAILSARLSKSRRLENLIAQLPGEKKNGLFGNLIALSLGLTPNFKSNFDLAEDAKLQLSKDTYDDDLDNLLAQIGDQYADLFLAAKNLSDAILLSDILRVNTEITKAPLSASMIKRYDEHHQDLTLLKALVRQQLPEKYKEIFFDQSKNGYAGYIDGGASQEEFYKFIKPILEKMDGTEELLVKLNREDLLRKQRTFDNGSIPHQIHLGELHAILRRQEDFYPFLKDNREKIEKILTFRIPYYVGPLARGNSRFAWMTRKSEETITPWNFEEVVDKGASAQSFIERMTNFDKNLPNEKVLPKHSLLYEYFTVYNELTKVKYVTEGMRKPAFLSGEQKKAIVDLLFKTNRKVTVKQLKEDYFKKIECFDSVEISGVEDRFNASLGTYHDLLKIIKDKDFLDNEENEDILEDIVLTLTLFEDREMIEERLKTYAHLFDDKVMKQLKRRRYTGWGRLSRKLINGIRDKQSGKTILDFLKSDGFANRNFMQLIHDDSLTFKEDIQKAQVSGQGDSLHEHIANLAGSPAIKKGILQTVKVVDELVKVMGRHKPENIVIEMARENQTTQKGQKNSRERMKRIEEGIKELGSQILKEHPVENTQLQNEKLYLYYLQNGRDMYVDQELDINRLSDYDVDAIVPQSFLKDDSIDNKVLTRSDKNRGKSDNVPSEEVVKKMKNYWRQLLNAKLITQRKFDNLTKAERGGLSELDKAGFIKRQLVETRQITKHVAQILDSRMNTKYDENDKLIREVKVITLKSKLVSDFRKDFQFYKVREINNYHHAHDAYLNAVVGTALIKKYPKLESEFVYGDYKVYDVRKMIAKSEQEIGKATAKYFFYSNIMNFFKTEITLANGEIRKRPLIETNGETGEIVWDKGRDFATVRKVLSMPQVNIVKKTEVQTGGFSKESILPKRNSDKLIARKKDWDPKKYGGFDSPTVAYSVLVVAKVEKGKSKKLKSVKELLGITIMERSSFEKNPIDFLEAKGYKEVKKDLIIKLPKYSLFELENGRKRMLASAGELQKGNELALPSKYVNFLYLASHYEKLKGSPEDNEQKQLFVEQHKHYLDEIIEQISEFSKRVILADANLDKVLSAYNKHRDKPIREQAENIIHLFTLTNLGAPAAFKYFDTTIDRKRYTSTKEVLDATLIHQSITGLYETRIDLSQLGGDNSKKRSLEDNETEIKVSRDTWNTKNMRSLEPPRSKKRIH

SEQ ID NO: 136 - protein, 1712 aa, Artificial Sequence
  chemically synthesized
MPKKKRKVSSSSWVDRIEEAEINHEKFHSDPQYLRTEFNLPKMVAEEIRRKCPVCRIRGEQVGGQLKIGPGIWQMDCTHFDGKIILVGIHVESGYIWAQIISQETADCTVKAVLQLLSAHNVTELQTDNGPNFKNQKMEGVLNYMGVKHKFGIPGNPQSQALVENVNHTLKVWIRKFLPETTSLDNALSLAVHSLNFKRRGRIGGMAPYELLAQQESLRIQDYFSAIPQKLQAQWIYYKDQKDKKWKGPMRVEYWGQGSVLLKDEEKGYFLIPRRHIRRVPEPCALPEGDEGGGGSGGGGSGGGGSDKKYSIGLAIGTNSVGWAVITDEYKVPSKKFKVLGNTDRHSIKKNLIGALLFDSGETAEATRLKRTARRRYTRRKNRICYLQEIFSNEMAKVDDSFFHRLEESFLVEEDKKHERHPIFGNIVDEVAYHEKYPTIYHLRKKLVDSTDKADLRLIYLALAHMIKFRGHFLIEGDLNPDNSDVDKLFIQLVQTYNQLFEENPINASGVDAKAILSARLSKSRRLENLIAQLPGEKKNGLFGNLIALSLGLTPNFKSNFDLAEDAKLQLSKDTYDDDLDNLLAQIGDQYADLFLAAKNLSDAILLSDILRVNTEITKAPLSASMIKRYDEHHQDLTLLKALVRQQLPEKYKEIFFDQSKNGYAGYIDGGASQEEFYKFIKPILEKMDGTEELLVKLNREDLLRKQRTFDNGSIPHQIHLGELHAILRRQEDFYPFLKDNREKIEKILTFRIPYYVGPLARGNSRFAWMTRKSEETITPWNFEEVVDKGASAQSFIERMTNFDKNLPNEKVLPKHSLLYEYFTVYNELTKVKYVTEGMRKPAFLSGEQKKAIVDLLFKTNRKVTVKQLKEDYFKKIECFDSVEISGVEDRFNASLGTYHDLLKIIKDKDFLDNEENEDILEDIVLTLTLFEDREMIEERLKTYAHLFDDKVMKQLKRRRYTGWGRLSRKLINGIRDKQSGKTILDFLKSDGFANRNFMQLIHDDSLTFKEDIQKAQVSGQGDSLHEHIANLAGSPAIKKGILQTVKVVDELVKVMGRHKPENIVIEMARENQTTQKGQKNSRERMKRIEEGIKELGSQILKEHPVENTQLQNEKLYLYYLQNGRDMYVDQELDINRLSDYDVDAIVPQSFLKDDSIDNKVLTRSDKNRGKSDNVPSEEVVKKMKNYWRQLLNAKLITQRKFDNLTKAERGGLSELDKAGFIKRQLVETRQITKHVAQILDSRMNTKYDENDKLIREVKVITLKSKLVSDFRKDFQFYKVREINNYHHAHDAYLNAVVGTALIKKYPKLESEFVYGDYKVYDVRKMIAKSEQEIGKATAKYFFYSNIMNFFKTEITLANGEIRKRPLIETNGETGEIVWDKGRDFATVRKVLSMPQVNIVKKTEVQTGGFSKESILPKRNSDKLIARKKDWDPKKYGGFDSPTVAYSVLVVAKVEKGKSKKLKSVKELLGITIMERSSFEKNPIDFLEAKGYKEVKKDLIIKLPKYSLFELENGRKRMLASAGELQKGNELALPSKYVNFLYLASHYEKLKGSPEDNEQKQLFVEQHKHYLDEIIEQISEFSKRVILADANLDKVLSAYNKHRDKPIREQAENIIHLFTLTNLGAPAAFKYFDTTIDRKRYTSTKEVLDATLIHQSITGLYETRIDLSQLGGDNSKKRSLEDNETEIKVSRDTWNTKNMRSLEPPRSKKRIH

SEQ ID NO: 137 - protein, 1654 aa, Artificial Sequence
  chemically synthesized
MPKKKRKVSSSSWVDRIEEAEINHEKFHSDPQYLRTEFNLPKMVAEEIRRKCPVCRIRGEQVGGQLKIGPGIWQMDCTHFDGKIILVGIHVESGYIWAQIISQETADCTVKAVLQLLSAHNVTELQTDNGPNFKNQKMEGVLNYMGVKHKFGIPGNPQSQALVENVNHTLKVWIRKFLPETTSLDNALSLAVHSLNFKRRGRIGGMAPYELLAQQESLRIQDYFSAIPQKLQAGGGGSGGGGSGGGGSDKKYSIGLAIGTNSVGWAVITDEYKVPSKKFKVLGNTDRHSIKKNLIGALLFDSGETAEATRLKRTARRRYTRRKNRICYLQEIFSNEMAKVDDSFFHRLEESFLVEEDKKHERHPIFGNIVDEVAYHEKYPTIYHLRKKLVDSTDKADLRLIYLALAHMIKFRGHFLIEGDLNPDNSDVDKLFIQLVQTYNQLFEENPINASGVDAKAILSARLSKSRRLENLIAQLPGEKKNGLFGNLIALSLGLTPNFKSNFDLAEDAKLQLSKDTYDDDLDNLLAQIGDQYADLFLAAKNLSDAILLSDILRVNTEITKAPLSASMIKRYDEHHQDLTLLKALVRQQLPEKYKEIFFDQSKNGYAGYIDGGASQEEFYKFIKPILEKMDGTEELLVKLNREDLLRKQRTFDNGSIPHQIHLGELHAILRRQEDFYPFLKDNREKIEKILTFRIPYYVGPLARGNSRFAWMTRKSEETITPWNFEEVVDKGASAQSFIERMTNFDKNLPNEKVLPKHSLLYEYFTVYNELTKVKYVTEGMRKPAFLSGEQKKAIVDLLFKTNRKVTVKQLKEDYFKKIECFDSVEISGVEDRFNASLGTYHDLLKIIKDKDFLDNEENEDILEDIVLTLTLFEDREMIEERLKTYAHLFDDKVMKQLKRRRYTGWGRLSRKLINGIRDKQSGKTILDFLKSDGFANRNFMQLIHDDSLTFKEDIQKAQVSGQGDSLHEHIANLAGSPAIKKGILQTVKVVDELVKVMGRHKPENIVIEMARENQTTQKGQKNSRERMKRIEEGIKELGSQILKEHPVENTQLQNEKLYLYYLQNGRDMYVDQELDINRLSDYDVDAIVPQSFLKDDSIDNKVLTRSDKNRGKSDNVPSEEVVKKMKNYWRQLLNAKLITQRKFDNLTKAERGGLSELDKAGFIKRQLVETRQITKHVAQILDSRMNTKYDENDKLIREVKVITLKSKLVSDFRKDFQFYKVREINNYHHAHDAYLNAVVGTALIKKYPKLESEFVYGDYKVYDVRKMIAKSEQEIGKATAKYFFYSNIMNFFKTEITLANGEIRKRPLIETNGETGEIVWDKGRDFATVRKVLSMPQVNIVKKTEVQTGGFSKESILPKRNSDKLIARKKDWDPKKYGGFDSPTVAYSVLVVAKVEKGKSKKLKSVKELLGITIMERSSFEKNPIDFLEAKGYKEVKKDLIIKLPKYSLFELENGRKRMLASAGELQKGNELALPSKYVNFLYLASHYEKLKGSPEDNEQKQLFVEQHKHYLDEIIEQISEFSKRVILADANLDKVLSAYNKHRDKPIREQAENIIHLFTLTNLGAPAAFKYFDTTIDRKRYTSTKEVLDATLIHQSITGLYETRIDLSQLGGDNSKKRSLEDNETEIKVSRDTWNTKNMRSLEPPRSKKRIH

SEQ ID NO: 138 - protein, 1712 aa, Artificial Sequence
  chemically synthesized
MPKKKRKVSSTCFLENIPSATEDHERWHTSPDILVRQFHLPKRIAKEIVARCQECKRTTTSPVRGTNPRGRFLWQMDNTHWNKTIIWVAVETNSGLVEAQVIPEETALQVALCILQLIQRYTVLHLHSDNGPCFTAHRIENLCKYLGITKTTGIPYNPQSQGVVERAHRDLKDRLAAYQGDCETVEAALSLALVSLNKKRGGIGGHTPYEIYLESEHTKYQDQLEQQFSKQKIEKWCYVRNRRKEWKGPYKVLWDGDGAAVIEEEGKTALYPHRHMRFIPPPDSDIQDGSSGGGGSGGGGSGGGGSDKKYSIGLAIGTNSVGWAVITDEYKVPSKKFKVLGNTDRHSIKKNLIGALLFDSGETAEATRLKRTARRRYTRRKNRICYLQEIFSNEMAKVDDSFFHRLEESFLVEEDKKHERHPIFGNIVDEVAYHEKYPTIYHLRKKLVDSTDKADLRLIYLALAHMIKFRGHFLIEGDLNPDNSDVDKLFIQLVQTYNQLFEENPINASGVDAKAILSARLSKSRRLENLIAQLPGEKKNGLFGNLIALSLGLTPNFKSNFDLAEDAKLQLSKDTYDDDLDNLLAQIGDQYADLFLAAKNLSDAILLSDILRVNTEITKAPLSASMIKRYDEHHQDLTLLKALVRQQLPEKYKEIFFDQSKNGYAGYIDGGASQEEFYKFIKPILEKMDGTEELLVKLNREDLLRKQRTFDNGSIPHQIHLGELHAILRRQEDFYPFLKDNREKIEKILTFRIPYYVGPLARGNSRFAWMTRKSEETITPWNFEEVVDKGASAQSFIERMTNFDKNLPNEKVLPKHSLLYEYFTVYNELTKVKYVTEGMRKPAFLSGEQKKAIVDLLFKTNRKVTVKQLKEDYFKKIECFDSVEISGVEDRFNASLGTYHDLLKIIKDKDFLDNEENEDILEDIVLTLTLFEDREMIEERLKTYAHLFDDKVMKQLKRRRYTGWGRLSRKLINGIRDKQSGKTILDFLKSDGFANRNFMQLIHDDSLTFKEDIQKAQVSGQGDSLHEHIANLAGSPAIKKGILQTVKVVDELVKVMGRHKPENIVIEMARENQTTQKGQKNSRERMKRIEEGIKELGSQILKEHPVENTQLQNEKLYLYYLQNGRDMYVDQELDINRLSDYDVDAIVPQSFLKDDSIDNKVLTRSDKNRGKSDNVPSEEVVKKMKNYWRQLLNAKLITQRKFDNLTKAERGGLSELDKAGFIKRQLVETRQITKHVAQILDSRMNTKYDENDKLIREVKVITLKSKLVSDFRKDFQFYKVREINNYHHAHDAYLNAVVGTALIKKYPKLESEFVYGDYKVYDVRKMIAKSEQEIGKATAKYFFYSNIMNFFKTEITLANGEIRKRPLIETNGETGEIVWDKGRDFATVRKVLSMPQVNIVKKTEVQTGGFSKESILPKRNSDKLIARKKDWDPKKYGGFDSPTVAYSVLVVAKVEKGKSKKLKSVKELLGITIMERSSFEKNPIDFLEAKGYKEVKKDLIIKLPKYSLFELENGRKRMLASAGELQKGNELALPSKYVNFLYLASHYEKLKGSPEDNEQKQLFVEQHKHYLDEIIEQISEFSKRVILADANLDKVLSAYNKHRDKPIREQAENIIHLFTLTNLGAPAAFKYFDTTIDRKRYTSTKEVLDATLIHQSITGLYETRIDLSQLGGDNSKKRSLEDNETEIKVSRDTWNTKNMRSLEPPRSKKRIH

SEQ ID NO: 139 - protein, 1655 aa, Artificial Sequence
  chemically synthesized
MPKKKRKVSSTCFLENIPSATEDHERWHTSPDILVRQFHLPKRIAKEIVARCQECKRTTTSPVRGTNPRGRFLWQMDNTHWNKTIIWVAVETNSGLVEAQVIPEETALQVALCILQLIQRYTVLHLHSDNGPCFTAHRIENLCKYLGITKTTGIPYNPQSQGVVERAHRDLKDRLAAYQGDCETVEAALSLALVSLNKKRGGIGGHTPYEIYLESEHTKYQDQLEQQFSKQKIEGGGGSGGGGSGGGGSDKKYSIGLAIGTNSVGWAVITDEYKVPSKKFKVLGNTDRHSIKKNLIGALLFDSGETAEATRLKRTARRRYTRRKNRICYLQEIFSNEMAKVDDSFFHRLEESFLVEEDKKHERHPIFGNIVDEVAYHEKYPTIYHLRKKLVDSTDKADLRLIYLALAHMIKFRGHFLIEGDLNPDNSDVDKLFIQLVQTYNQLFEENPINASGVDAKAILSARLSKSRRLENLIAQLPGEKKNGLFGNLIALSLGLTPNFKSNFDLAEDAKLQLSKDTYDDDLDNLLAQIGDQYADLFLAAKNLSDAILLSDILRVNTEITKAPLSASMIKRYDEHHQDLTLLKALVRQQLPEKYKEIFFDQSKNGYAGYIDGGASQEEFYKFIKPILEKMDGTEELLVKLNREDLLRKQRTFDNGSIPHQIHLGELHAILRRQEDFYPFLKDNREKIEKILTFRIPYYVGPLARGNSRFAWMTRKSEETITPWNFEEVVDKGASAQSFIERMTNFDKNLPNEKVLPKHSLLYEYFTVYNELTKVKYVTEGMRKPAFLSGEQKKAIVDLLFKTNRKVTVKQLKEDYFKKIECFDSVEISGVEDRFNASLGTYHDLLKIIKDKDFLDNEENEDILEDIVLTLTLFEDREMIEERLKTYAHLFDDKVMKQLKRRRYTGWGRLSRKLINGIRDKQSGKTILDFLKSDGFANRNFMQLIHDDSLTFKEDIQKAQVSGQGDSLHEHIANLAGSPAIKKGILQTVKVVDELVKVMGRHKPENIVIEMARENQTTQKGQKNSRERMKRIEEGIKELGSQILKEHPVENTQLQNEKLYLYYLQNGRDMYVDQELDINRLSDYDVDAIVPQSFLKDDSIDNKVLTRSDKNRGKSDNVPSEEVVKKMKNYWRQLLNAKLITQRKFDNLTKAERGGLSELDKAGFIKRQLVETRQITKHVAQILDSRMNTKYDENDKLIREVKVITLKSKLVSDFRKDFQFYKVREINNYHHAHDAYLNAVVGTALIKKYPKLESEFVYGDYKVYDVRKMIAKSEQEIGKATAKYFFYSNIMNFFKTEITLANGEIRKRPLIETNGETGEIVWDKGRDFATVRKVLSMPQVNIVKKTEVQTGGFSKESILPKRNSDKLIARKKDWDPKKYGGFDSPTVAYSVLVVAKVEKGKSKKLKSVKELLGITIMERSSFEKNPIDFLEAKGYKEVKKDLIIKLPKYSLFELENGRKRMLASAGELQKGNELALPSKYVNFLYLASHYEKLKGSPEDNEQKQLFVEQHKHYLDEIIEQISEFSKRVILADANLDKVLSAYNKHRDKPIREQAENIIHLFTLTNLGAPAAFKYFDTTIDRKRYTSTKEVLDATLIHQSITGLYETRIDLSQLGGDNSKKRSLEDNETEIKVSRDTWNTKNMRSLEPPRSKKRIH

SEQ ID NO: 140 - protein, 1698 aa, Artificial Sequence
  chemically synthesized
MPKKKRKVSSNVHTSESTRKYPYPFIHRMLAHANAQTIRYSLKNNTITYFNESDVDWSSAIDYQCPDCLIGKSTKHRHIKGSRLKYQNSYEPFQYLHTDIFGPVHNLPKSAPSYFISFTDETTKFRWVYPLHDRREDSILDVFTTILAFIKNQFQASVLVIQMDRGSEYTNRTLHKFLEKNGITPCYTTTADSRAHGVAERLNRTLLDDCRTQLQCSGLPNHLWFSAIEFSTIVRNSLASPKSKKSARQHAGLAGLDISTLLPFGQPVIVNDHNPNSGGGGSGGGGSGGGGSDKKYSIGLAIGTNSVGWAVITDEYKVPSKKFKVLGNTDRHSIKKNLIGALLFDSGETAEATRLKRTARRRYTRRKNRICYLQEIFSNEMAKVDDSFFHRLEESFLVEEDKKHERHPIFGNIVDEVAYHEKYPTIYHLRKKLVDSTDKADLRLIYLALAHMIKFRGHFLIEGDLNPDNSDVDKLFIQLVQTYNQLFEENPINASGVDAKAILSARLSKSRRLENLIAQLPGEKKNGLFGNLIALSLGLTPNFKSNFDLAEDAKLQLSKDTYDDDLDNLLAQIGDQYADLFLAAKNLSDAILLSDILRVNTEITKAPLSASMIKRYDEHHQDLTLLKALVRQQLPEKYKEIFFDQSKNGYAGYIDGGASQEEFYKFIKPILEKMDGTEELLVKLNREDLLRKQRTFDNGSIPHQIHLGELHAILRRQEDFYPFLKDNREKIEKILTFRIPYYVGPLARGNSRFAWMTRKSEETITPWNFEEVVDKGASAQSFIERMTNFDKNLPNEKVLPKHSLLYEYFTVYNELTKVKYVTEGMRKPAFLSGEQKKAIVDLLFKTNRKVTVKQLKEDYFKKIECFDSVEISGVEDRFNASLGTYHDLLKIIKDKDFLDNEENEDILEDIVLTLTLFEDREMIEERLKTYAHLFDDKVMKQLKRRRYTGWGRLSRKLINGIRDKQSGKTILDFLKSDGFANRNFMQLIHDDSLTFKEDIQKAQVSGQGDSLHEHIANLAGSPAIKKGILQTVKVVDELVKVMGRHKPENIVIEMARENQTTQKGQKNSRERMKRIEEGIKELGSQILKEHPVENTQLQNEKLYLYYLQNGRDMYVDQELDINRLSDYDVDAIVPQSFLKDDSIDNKVLTRSDKNRGKSDNVPSEEVVKKMKNYWRQLLNAKLITQRKFDNLTKAERGGLSELDKAGFIKRQLVETRQITKHVAQILDSRMNTKYDENDKLIREVKVITLKSKLVSDFRKDFQFYKVREINNYHHAHDAYLNAVVGTALIKKYPKLESEFVYGDYKVYDVRKMIAKSEQEIGKATAKYFFYSNIMNFFKTEITLANGEIRKRPLIETNGETGEIVWDKGRDFATVRKVLSMPQVNIVKKTEVQTGGFSKESILPKRNSDKLIARKKDWDPKKYGGFDSPTVAYSVLVVAKVEKGKSKKLKSVKELLGITIMERSSFEKNPIDFLEAKGYKEVKKDLIIKLPKYSLFELENGRKRMLASAGELQKGNELALPSKYVNFLYLASHYEKLKGSPEDNEQKQLFVEQHKHYLDEIIEQISEFSKRVILADANLDKVLSAYNKHRDKPIREQAENIIHLFTLTNLGAPAAFKYFDTTIDRKRYTSTKEVLDATLIHQSITGLYETRIDLSQLGGDNSKKRSLEDNETEIKVSRDTWNTKNMRSLEPPRSKKRIH

SEQ ID NO: 141 - protein, 1718 aa, Artificial Sequence
  chemically synthesized
MPKKKRKVSSKYVFIEKHQAEFSIKAMCRVLRVARSGWYTWCQRRTRISTRQQFRQHCDSVVLAAFTRSKQRYGAPRLTDELRAQGYPFNVKTVAASLRRQGLRAKASRKFSPVSYRAHGLPVSENLLEQDFYASGPNQKWAGDITYLRTDEGWLYLAVVIDLWSRAVIGWSMSPRMTAQLACDALQMALWRRKRPRNVIVHTDRGGQYCSADYQAQLKRHNLRGSMSAKGCCYDNACVESFFHSLKVECIHGEHFISREIMRATVFNYIECDYNRWRRHSWCGGLSPEQFENKNLAGGGGSGGGGSGGGGSDKKYSIGLAIGTNSVGWAVITDEYKVPSKKFKVLGNTDRHSIKKNLIGALLFDSGETAEATRLKRTARRRYTRRKNRICYLQEIFSNEMAKVDDSFFHRLEESFLVEEDKKHERHPIFGNIVDEVAYHEKYPTIYHLRKKLVDSTDKADLRLIYLALAHMIKFRGHFLIEGDLNPDNSDVDKLFIQLVQTYNQLFEENPINASGVDAKAILSARLSKSRRLENLIAQLPGEKKNGLFGNLIALSLGLTPNFKSNFDLAEDAKLQLSKDTYDDDLDNLLAQIGDQYADLFLAAKNLSDAILLSDILRVNTEITKAPLSASMIKRYDEHHQDLTLLKALVRQQLPEKYKEIFFDQSKNGYAGYIDGGASQEEFYKFIKPILEKMDGTEELLVKLNREDLLRKQRTFDNGSIPHQIHLGELHAILRRQEDFYPFLKDNREKIEKILTFRIPYYVGPLARGNSRFAWMTRKSEETITPWNFEEVVDKGASAQSFIERMTNFDKNLPNEKVLPKHSLLYEYFTVYNELTKVKYVTEGMRKPAFLSGEQKKAIVDLLFKTNRKVTVKQLKEDYFKKIECFDSVEISGVEDRFNASLGTYHDLLKIIKDKDFLDNEENEDILEDIVLTLTLFEDREMIEERLKTYAHLFDDKVMKQLKRRRYTGWGRLSRKLINGIRDKQSGKTILDFLKSDGFANRNFMQLIHDDSLTFKEDIQKAQVSGQGDSLHEHIANLAGSPAIKKGILQTVKVVDELVKVMGRHKPENIVIEMARENQTTQKGQKNSRERMKRIEEGIKELGSQILKEHPVENTQLQNEKLYLYYLQNGRDMYVDQELDINRLSDYDVDAIVPQSFLKDDSIDNKVLTRSDKNRGKSDNVPSEEVVKKMKNYWRQLLNAKLITQRKFDNLTKAERGGLSELDKAGFIKRQLVETRQITKHVAQILDSRMNTKYDENDKLIREVKVITLKSKLVSDFRKDFQFYKVREINNYHHAHDAYLNAVVGTALIKKYPKLESEFVYGDYKVYDVRKMIAKSEQEIGKATAKYFFYSNIMNFFKTEITLANGEIRKRPLIETNGETGEIVWDKGRDFATVRKVLSMPQVNIVKKTEVQTGGFSKESILPKRNSDKLIARKKDWDPKKYGGFDSPTVAYSVLVVAKVEKGKSKKLKSVKELLGITIMERSSFEKNPIDFLEAKGYKEVKKDLIIKLPKYSLFELENGRKRMLASAGELQKGNELALPSKYVNFLYLASHYEKLKGSPEDNEQKQLFVEQHKHYLDEIIEQISEFSKRVILADANLDKVLSAYNKHRDKPIREQAENIIHLFTLTNLGAPAAFKYFDTTIDRKRYTSTKEVLDATLIHQSITGLYETRIDLSQLGGDNSKKRSLEDNETEIKVSRDTWNTKNMRSLEPPRSKKRIH

SEQ ID NO: 142 - protein, 1606 aa, Artificial Sequence
  chemically synthesized
MPKKKRKVSSVSENLLEQDFYASGPNQKWAGDITYLRTDEGWLYLAVVIDLWSRAVIGWSMSPRMTAQLACDALQMALWRRKRPRNVIVHTDRGGQYCSADYQAQLKRHNLRGSMSAKGCCYDNACVESFFHSLKVECIHGEHFISREIMRATVFNYIECDYNRWRRHSWCGGLSPEQFENKNLAGGGGSGGGGSGGGGSDKKYSIGLAIGTNSVGWAVITDEYKVPSKKFKVLGNTDRHSIKKNLIGALLFDSGETAEATRLKRTARRRYTRRKNRICYLQEIFSNEMAKVDDSFFHRLEESFLVEEDKKHERHPIFGNIVDEVAYHEKYPTIYHLRKKLVDSTDKADLRLIYLALAHMIKFRGHFLIEGDLNPDNSDVDKLFIQLVQTYNQLFEENPINASGVDAKAILSARLSKSRRLENLIAQLPGEKKNGLFGNLIALSLGLTPNFKSNFDLAEDAKLQLSKDTYDDDLDNLLAQIGDQYADLFLAAKNLSDAILLSDILRVNTEITKAPLSASMIKRYDEHHQDLTLLKALVRQQLPEKYKEIFFDQSKNGYAGYIDGGASQEEFYKFIKPILEKMDGTEELLVKLNREDLLRKQRTFDNGSIPHQIHLGELHAILRRQEDFYPFLKDNREKIEKILTFRIPYYVGPLARGNSRFAWMTRKSEETITPWNFEEVVDKGASAQSFIERMTNFDKNLPNEKVLPKHSLLYEYFTVYNELTKVKYVTEGMRKPAFLSGEQKKAIVDLLFKTNRKVTVKQLKEDYFKKIECFDSVEISGVEDRFNASLGTYHDLLKIIKDKDFLDNEENEDILEDIVLTLTLFEDREMIEERLKTYAHLFDDKVMKQLKRRRYTGWGRLSRKLINGIRDKQSGKTILDFLKSDGFANRNFMQLIHDDSLTFKEDIQKAQVSGQGDSLHEHIANLAGSPAIKKGILQTVKVVDELVKVMGRHKPENIVIEMARENQTTQKGQKNSRERMKRIEEGIKELGSQILKEHPVENTQLQNEKLYLYYLQNGRDMYVDQELDINRLSDYDVDAIVPQSFLKDDSIDNKVLTRSDKNRGKSDNVPSEEVVKKMKNYWRQLLNAKLITQRKFDNLTKAERGGLSELDKAGFIKRQLVETRQITKHVAQILDSRMNTKYDENDKLIREVKVITLKSKLVSDFRKDFQFYKVREINNYHHAHDAYLNAVVGTALIKKYPKLESEFVYGDYKVYDVRKMIAKSEQEIGKATAKYFFYSNIMNFFKTEITLANGEIRKRPLIETNGETGEIVWDKGRDFATVRKVLSMPQVNIVKKTEVQTGGFSKESILPKRNSDKLIARKKDWDPKKYGGFDSPTVAYSVLVVAKVEKGKSKKLKSVKELLGITIMERSSFEKNPIDFLEAKGYKEVKKDLIIKLPKYSLFELENGRKRMLASAGELQKGNELALPSKYVNFLYLASHYEKLKGSPEDNEQKQLFVEQHKHYLDEIIEQISEFSKRVILADANLDKVLSAYNKHRDKPIREQAENIIHLFTLTNLGAPAAFKYFDTTIDRKRYTSTKEVLDATLIHQSITGLYETRIDLSQLGGDNSKKRSLEDNETEIKVSRDTWNTKNMRSLEPPRSKKRIH

SEQ ID NO: 143 - protein, 1672 aa, Artificial Sequence
  chemically synthesized
MDYKDHDGDYKDHDIDYKDDDDKGGNSKKRSLEDNETEIKVSRDTWNTKNMRSLEPPRSKKRIHGGDKKYSIGLDIGTNSVGWAVITDEYKVPSKKFKVLGNTDRHSIKKNLIGALLFDSGETAEATRLKRTARRRYTRRKNRICYLQEIFSNEMAKVDDSFFHRLEESFLVEEDKKHERHPIFGNIVDEVAYHEKYPTIYHLRKKLVDSTDKADLRLIYLALAHMIKFRGHFLIEGDLNPDNSDVDKLFIQLVQTYNQLFEENPINASGVDAKAILSARLSKSRRLENLIAQLPGEKKNGLFGNLIALSLGLTPNFKSNFDLAEDAKLQLSKDTYDDDLDNLLAQIGDQYADLFLAAKNLSDAILLSDILRVNTEITKAPLSASMIKRYDEHHQDLTLLKALVRQQLPEKYKEIFFDQSKNGYAGYIDGGASQEEFYKFIKPILEKMDGTEELLVKLNREDLLRKQRTFDNGSIPHQIHLGELHAILRRQEDFYPFLKDNREKIEKILTFRIPYYVGPLARGNSRFAWMTRKSEETITPWNFEEVVDKGASAQSFIERMTNFDKNLPNEKVLPKHSLLYEYFTVYNELTKVKYVTEGMRKPAFLSGEQKKAIVDLLFKTNRKVTVKQLKEDYFKKIECFDSVEISGVEDRFNASLGTYHDLLKIIKDKDFLDNEENEDILEDIVLTLTLFEDREMIEERLKTYAHLFDDKVMKQLKRRRYTGWGRLSRKLINGIRDKQSGKTILDFLKSDGFANRNFMQLIHDDSLTFKEDIQKAQVSGQGDSLHEHIANLAGSPAIKKGILQTVKVVDELVKVMGRHKPENIVIEMARENQTTQKGQKNSRERMKRIEEGIKELGSQILKEHPVENTQLQNEKLYLYYLQNGRDMYVDQELDINRLSDYDVDHIVPQSFLKDDSIDNKVLTRSDKNRGKSDNVPSEEVVKKMKNYWRQLLNAKLITQRKFDNLTKAERGGLSELDKAGFIKRQLVETRQITKHVAQILDSRMNTKYDENDKLIREVKVITLKSKLVSDFRKDFQFYKVREINNYHHAHDAYLNAVVGTALIKKYPKLESEFVYGDYKVYDVRKMIAKSEQEIGKATAKYFFYSNIMNFFKTEITLANGEIRKRPLIETNGETGEIVWDKGRDFATVRKVLSMPQVNIVKKTEVQTGGFSKESILPKRNSDKLIARKKDWDPKKYGGFDSPTVAYSVLVVAKVEKGKSKKLKSVKELLGITIMERSSFEKNPIDFLEAKGYKEVKKDLIIKLPKYSLFELENGRKRMLASAGELQKGNELALPSKYVNFLYLASHYEKLKGSPEDNEQKQLFVEQHKHYLDEIIEQISEFSKRVILADANLDKVLSAYNKHRDKPIREQAENIIHLFTLTNLGAPAAFKYFDTTIDRKRYTSTKEVLDATLIHQSITGLYETRIDLSQLGGDGGGGSGGGGSGGGGSLEFLDGIDKAQDEHEKYHSNWRAMASDFNLPPVVAKEIVASCDKCQLKGEAMHGQVDCSPGIWQLDCTHLEGKVILVAVHVASGYIEAEVIPAETGQETAYFLLKLAGRWPVKTIHTDNGSNFTGATVRAACWWAGIKQEFGIPYNPQSQGVVESMNKELKKIIGQVRDQAEHLKTAVQMAVFIHNFKRKGGIGGYSAGERIVDIIATDIQTKELQKQITKIQN

SEQ ID NO: 144 - protein, 1384 aa, Artificial Sequence
  chemically synthesized
MPKKKRKVSSFLDGIDKAQDEHEKYHSNWRAMASDFNLPPVVAKEIVASCDKCQLKGEAMHGQVDCSPGIWQLDCTHLEGKVILVAVHVASGYIEAEVIPAETGQETAYFLLKLAGRWPVKTIHTDNGSNFTGATVRAACWWAGIKQEFGIPYNPQSQGVVESMNKELKKIIGQVRDQAEHLKTAVQMAVFIHNFKRKGGIGGYSAGERIVDIIATDIQTKELQKQITKIQNLKGGGGSGGGGSGGGGSGGGGSGGGGSGGGGSTRGKRNYILGLAIGITSVGYGIIDYETRDVIDAGVRLFKEANVENNEGRRSKRGARRLKRRRRHRIQRVKKLLFDYNLLTDHSELSGINPYEARVKGLSQKLSEEEFSAALLHLAKRRGVHNVNEVEEDTGNELSTKEQISRNSKALEEKYVAELQLERLKKDGEVRGSINRFKTSDYVKEAKQLLKVQKAYHQLDQSFIDTYIDLLETRRTYYEGPGEGSPFGWKDIKEWYEMLMGHCTYFPEELRSVKYAYNADLYNALNDLNNLVITRDENEKLEYYEKFQIIENVFKQKKKPTLKQIAKEILVNEEDIKGYRVTSTGKPEFTNLKVYHDIKDITARKEIIENAELLDQIAKILTIYQSSEDIQEELTNLNSELTQEEIEQISNLKGYTGTHNLSLKAINLILDELWHTNDNQIAIFNRLKLVPKKVDLSQQKEIPTTLVDDFILSPVVKRSFIQSIKVINAIIKKYGLPNDIIIELAREKNSKDAQKMINEMQKRNRQTNERIEEIIRTTGKENAKYLIEKIKLHDMQEGKCLYSLEAIPLEDLLNNPFNYEVDHIIPRSVSFDNSFNNKVLVKQEEASKKGNRTPFQYLSSSDSKISYETFKKHILNLAKGKGRISKTKKEYLLEERDINRFSVQKDFINRNLVDTRYATRGLMNLLRSYFRVNNLDVKVKSINGGFTSFLRRKWKFKKERNKGYKHHAEDALIIANADFIFKEWKKLDKAKKVMENQMFEEKQAESMPEIETEQEYKEIFITPHQIKHIKDFKDYKYSHRVDKKPNRELINDTLYSTRKDDKGNTLIVNNLNGLYDKDNDKLKKLINKSPEKLLMYHHDPQTYQKLKLIMEQYGDEKNPLYKYYEETGNYLTKYSKKDNGPVIKKIKYYGNKLNAHLDITDDYPNSRNKVVKLSLKPYRFDVYLDNGVYKFVTVKNLDVIKKENYYEVNSKCYEEAKKLKKISNQAEFIASFYNNDLIKINGELYRVIGVNNDLLNRIEVNMIDITYREYLENMNDKRPPRIIKTIASKTQSIKKYSTDILGNLYEVKSKKHPQIIKKGGSNSKKRSLEDNETEIKVSRDTWNTKNMRSLEPPRSKKRIHLEDYKDHDGDYKDHDIDYKDDDDK

SEQ ID NO: 145 - protein, 842 aa, Artificial Sequence
  chemically synthesized
MDYKDHDGDYKDHDIDYKDDDDKGGNSKKRSLEDNETEIKVSRDTWNTKNMRSLEPPRSKKRIHGGPGGIDAKNTITKTLKLRIVRPYNSAEVEKIVADEKNNREKIALEKNKDKVKEACSKHLKVAAYCTTQVERNACLFCKARKLDDKFYQKLRGQFPDAVFWQEISEIFRQLQKQAAEIYNQSLIELYYEIFIKGKGIANASSVEHYLSDVCYTRAAELFKNAAIASGLRSKIKSNFRLKELKNMKSGLPTTKSDNFPIPLVKQKGGQYTGFEISNHNSDFIIKIPFGRWQVKKEIDKYRPWEKFDFEQVQKSPKPISLLLSTQRRKRNKGWSKDEGTEAEIKKVMNGDYQTSYIEVKRGSKICEKSAWMLNLSIDVPKIDKGVDPSIIGGIAVGVKSPLVCAINNAFSRYSISDNDLFHFNKKMFARRRILLKKNRHKRAGHGAKNKLKPITILTEKSERFRKKLIERWACEIADFFIKNKVGTVQMENLESMKRKEDSYFNIRLRGFWPYAEMQNKIEFKLKQYGIEIRKVAPNNTSKTCSKCGHLNNYFNFEYRKKNKFPHFKCEKCNFKENAAYNAALNISNPKLKSTKEEPGSGGGGSGGGGSGGGGSTRFLDGIDKAQDEHEKYHSNWRAMASDFNLPPVVAKEIVASCDKCQLKGEAMHGQVDCSPGIWQLDCTHLEGKVILVAVHVASGYIEAEVIPAETGQETAYFLLKLAGRWPVKTIHTDNGSNFTGATVRAACWWAGIKQEFGIPYNPQSQGVVESMNKELKKIIGQVRDQAEHLKTAVQMAVFIHNFKRKGGIGGYSAGERIVDIIATDIQTKELQKQITKIQNLE

SEQ ID NO: 146 - protein, 840 aa, Artificial Sequence
  chemically synthesized
MTRFLDGIDKAQDEHEKYHSNWRAMASDFNLPPVVAKEIVASCDKCQLKGEAMHGQVDCSPGIWQLDCTHLEGKVILVAVHVASGYIEAEVIPAETGQETAYFLLKLAGRWPVKTIHTDNGSNFTGATVRAACWWAGIKQEFGIPYNPQSQGVVESMNKELKKIIGQVRDQAEHLKTAVQMAVFIHNFKRKGGIGGYSAGERIVDIIATDIQTKELQKQITKIQNLEGGGGSGGGGSGGGGSPGGIDAKNTITKTLKLRIVRPYNSAEVEKIVADEKNNREKIALEKNKDKVKEACSKHLKVAAYCTTQVERNACLFCKARKLDDKFYQKLRGQFPDAVFWQEISEIFRQLQKQAAEIYNQSLIELYYEIFIKGKGIANASSVEHYLSDVCYTRAAELFKNAAIASGLRSKIKSNFRLKELKNMKSGLPTTKSDNFPIPLVKQKGGQYTGFEISNHNSDFIIKIPFGRWQVKKEIDKYRPWEKFDFEQVQKSPKPISLLLSTQRRKRNKGWSKDEGTEAEIKKVMNGDYQTSYIEVKRGSKICEKSAWMLNLSIDVPKIDKGVDPSIIGGIAVGVKSPLVCAINNAFSRYSISDNDLFHFNKKMFARRRILLKKNRHKRAGHGAKNKLKPITILTEKSERFRKKLIERWACEIADFFIKNKVGTVQMENLESMKRKEDSYFNIRLRGFWPYAEMQNKIEFKLKQYGIEIRKVAPNNTSKTCSKCGHLNNYFNFEYRKKNKFPHFKCEKCNFKENAAYNAALNISNPKLKSTKEEPGSNSKKRSLEDNETEIKVSRDTWNTKNMRSLEPPRSKKRIHGGDYKDHDGDYKDHDIDYKDDDDK

SEQ ID NO: 147 - protein, 1423 aa, Artificial Sequence
  chemically synthesized
MDYKDHDGDYKDHDIDYKDDDDKMAPKKKRKVGIHGVPAADKKYSIGLDIGTNSVGWAVITDEYKVPSKKFKVLGNTDRHSIKKNLIGALLFDSGETAEATRLKRTARRRYTRRKNRICYLQEIFSNEMAKVDDSFFHRLEESFLVEEDKKHERHPIFGNIVDEVAYHEKYPTIYHLRKKLVDSTDKADLRLIYLALAHMIKFRGHFLIEGDLNPDNSDVDKLFIQLVQTYNQLFEENPINASGVDAKAILSARLSKSRRLENLIAQLPGEKKNGLFGNLIALSLGLTPNFKSNFDLAEDAKLQLSKDTYDDDLDNLLAQIGDQYADLFLAAKNLSDAILLSDILRVNTEITKAPLSASMIKRYDEHHQDLTLLKALVRQQLPEKYKEIFFDQSKNGYAGYIDGGASQEEFYKFIKPILEKMDGTEELLVKLNREDLLRKQRTFDNGSIPHQIHLGELHAILRRQEDFYPFLKDNREKIEKILTFRIPYYVGPLARGNSRFAWMTRKSEETITPWNFEEVVDKGASAQSFIERMTNFDKNLPNEKVLPKHSLLYEYFTVYNELTKVKYVTEGMRKPAFLSGEQKKAIVDLLFKTNRKVTVKQLKEDYFKKIECFDSVEISGVEDRFNASLGTYHDLLKIIKDKDFLDNEENEDILEDIVLTLTLFEDREMIEERLKTYAHLFDDKVMKQLKRRRYTGWGRLSRKLINGIRDKQSGKTILDFLKSDGFANRNFMQLIHDDSLTFKEDIQKAQVSGQGDSLHEHIANLAGSPAIKKGILQTVKVVDELVKVMGRHKPENIVIEMARENQTTQKGQKNSRERMKRIEEGIKELGSQILKEHPVENTQLQNEKLYLYYLQNGRDMYVDQELDINRLSDYDVDHIVPQSFLKDDSIDNKVLTRSDKNRGKSDNVPSEEVVKKMKNYWRQLLNAKLITQRKFDNLTKAERGGLSELDKAGFIKRQLVETRQITKHVAQILDSRMNTKYDENDKLIREVKVITLKSKLVSDFRKDFQFYKVREINNYHHAHDAYLNAVVGTALIKKYPKLESEFVYGDYKVYDVRKMIAKSEQEIGKATAKYFFYSNIMNFFKTEITLANGEIRKRPLIETNGETGEIVWDKGRDFATVRKVLSMPQVNIVKKTEVQTGGFSKESILPKRNSDKLIARKKDWDPKKYGGFDSPTVAYSVLVVAKVEKGKSKKLKSVKELLGITIMERSSFEKNPIDFLEAKGYKEVKKDLIIKLPKYSLFELENGRKRMLASAGELQKGNELALPSKYVNFLYLASHYEKLKGSPEDNEQKQLFVEQHKHYLDEIIEQISEFSKRVILADANLDKVLSAYNKHRDKPIREQAENIIHLFTLTNLGAPAAFKYFDTTIDRKRYTSTKEVLDATLIHQSITGLYETRIDLSQLGGDKRPAATKKAGQAKKKK

SEQ ID NO: 148 - protein, 1448 aa, Artificial Sequence
  chemically synthesized
MDYKDHDGDYKDHDIDYKDDDDKMAPKKKRKVGIHGVPAADKKYSIGLDIGTNSVGWAVITDEYKVPSKKFKVLGNTDRHSIKKNLIGALLFDSGETAEATRLKRTARRRYTRRKNRICYLQEIFSNEMAKVDDSFFHRLEESFLVEEDKKHERHPIFGNIVDEVAYHEKYPTIYHLRKKLVDSTDKADLRLIYLALAHMIKFRGHFLIEGDLNPDNSDVDKLFIQLVQTYNQLFEENPINASGVDAKAILSARLSKSRRLENLIAQLPGEKKNGLFGNLIALSLGLTPNFKSNFDLAEDAKLQLSKDTYDDDLDNLLAQIGDQYADLFLAAKNLSDAILLSDILRVNTEITKAPLSASMIKRYDEHHQDLTLLKALVRQQLPEKYKEIFFDQSKNGYAGYIDGGASQEEFYKFIKPILEKMDGTEELLVKLNREDLLRKQRTFDNGSIPHQIHLGELHAILRRQEDFYPFLKDNREKIEKILTFRIPYYVGPLARGNSRFAWMTRKSEETITPWNFEEVVDKGASAQSFIERMTNFDKNLPNEKVLPKHSLLYEYFTVYNELTKVKYVTEGMRKPAFLSGEQKKAIVDLLFKTNRKVTVKQLKEDYFKKIECFDSVEISGVEDRFNASLGTYHDLLKIIKDKDFLDNEENEDILEDIVLTLTLFEDREMIEERLKTYAHLFDDKVMKQLKRRRYTGWGRLSRKLINGIRDKQSGKTILDFLKSDGFANRNFMQLIHDDSLTFKEDIQKAQVSGQGDSLHEHIANLAGSPAIKKGILQTVKVVDELVKVMGRHKPENIVIEMARENQTTQKGQKNSRERMKRIEEGIKELGSQILKEHPVENTQLQNEKLYLYYLQNGRDMYVDQELDINRLSDYDVDHIVPQSFLKDDSIDNKVLTRSDKNRGKSDNVPSEEVVKKMKNYWRQLLNAKLITQRKFDNLTKAERGGLSELDKAGFIKRQLVETRQITKHVAQILDSRMNTKYDENDKLIREVKVITLKSKLVSDFRKDFQFYKVREINNYHHAHDAYLNAVVGTALIKKYPKLESEFVYGDYKVYDVRKMIAKSEQEIGKATAKYFFYSNIMNFFKTEITLANGEIRKRPLIETNGETGEIVWDKGRDFATVRKVLSMPQVNIVKKTEVQTGGFSKESILPKRNSDKLIARKKDWDPKKYGGFDSPTVAYSVLVVAKVEKGKSKKLKSVKELLGITIMERSSFEKNPIDFLEAKGYKEVKKDLIIKLPKYSLFELENGRKRMLASAGELQKGNELALPSKYVNFLYLASHYEKLKGSPEDNEQKQLFVEQHKHYLDEIIEQISEFSKRVILADANLDKVLSAYNKHRDKPIREQAENIIHLFTLTNLGAPAAFKYFDTTIDRKRYTSTKEVLDATLIHQSITGLYETRIDLSQLGGDGSNSKKRSLEDNETEIKVSRDTWNTKNMRSLEPPRSKKRIH

SEQ ID NO: 149 - protein, 594 aa, Artificial Sequence
  chemically synthesized
MDYKDHDGDYKDHDIDYKDDDDKGGNSKKRSLEDNETEIKVSRDTWNTKNMRSLEPPRSKKRIHGGAKNTITKTLKLRIVRPYNSAEVEKIVADEKNNREKIALEKNKDKVKEACSKHLKVAAYCTTQVERNACLFCKARKLDDKFYQKLRGQFPDAVFWQEISEIFRQLQKQAAEIYNQSLIELYYEIFIKGKGIANASSVEHYLSDVCYTRAAELFKNAAIASGLRSKIKSNFRLKELKNMKSGLPTTKSDNFPIPLVKQKGGQYTGFEISNHNSDFIIKIPFGRWQVKKEIDKYRPWEKFDFEQVQKSPKPISLLLSTQRRKRNKGWSKDEGTEAEIKKVMNGDYQTSYIEVKRGSKICEKSAWMLNLSIDVPKIDKGVDPSIIGGIDVGVKSPLVCAINNAFSRYSISDNDLFHFNKKMFARRRILLKKNRHKRAGHGAKNKLKPITILTEKSERFRKKLIERWACEIADFFIKNKVGTVQMENLESMKRKEDSYFNIRLRGFWPYAEMQNKIEFKLKQYGIEIRKVAPNNTSKTCSKCGHLNNYFNFEYRKKNKFPHFKCEKCNFKENADYNAALNISNPKLKSTKEEP

SEQ ID NO: 150 - protein, 1774 aa, Artificial Sequence
  chemically synthesized
MEQAPEDQGPQREPHNEWTLELLEELKNEAVRHFPRIWLHGLGQHIYETYGDTWAGVEAIIRILQQLLFIHFRIGCRHSRIGVTQQRRARNGASRSLVSAGIRKVLFLDGIDKAQDEHEKYHSNWRAMASDFNLPPVVAKEIVASCDKCQLKGEAMHGQVDCSPGIWQLDCTHLEGKVILVAVHVASGYIEAEVIPAETGQETAYFLLKLAGRWPVKTIHTDNGSNFTGATVRAACWWAGIKQEFGIPYNPQSQGVVESMNKELKKIIGQVRDQAEHLKTAVQMAVFIHNFKRKGGIGGYSAGERIVDIIATDIQTKELQKQITKIQNGGGGSGGGGSGGGGSDKKYSIGLAIGTNSVGWAVITDEYKVPSKKFKVLGNTDRHSIKKNLIGALLFDSGETAEATRLKRTARRRYTRRKNRICYLQEIFSNEMAKVDDSFFHRLEESFLVEEDKKHERHPIFGNIVDEVAYHEKYPTIYHLRKKLVDSTDKADLRLIYLALAHMIKFRGHFLIEGDLNPDNSDVDKLFIQLVQTYNQLFEENPINASGVDAKAILSARLSKSRRLENLIAQLPGEKKNGLFGNLIALSLGLTPNFKSNFDLAEDAKLQLSKDTYDDDLDNLLAQIGDQYADLFLAAKNLSDAILLSDILRVNTEITKAPLSASMIKRYDEHHQDLTLLKALVRQQLPEKYKEIFFDQSKNGYAGYIDGGASQEEFYKFIKPILEKMDGTEELLVKLNREDLLRKQRTFDNGSIPHQIHLGELHAILRRQEDFYPFLKDNREKIEKILTFRIPYYVGPLARGNSRFAWMTRKSEETITPWNFEEVVDKGASAQSFIERMTNFDKNLPNEKVLPKHSLLYEYFTVYNELTKVKYVTEGMRKPAFLSGEQKKAIVDLLFKTNRKVTVKQLKEDYFKKIECFDSVEISGVEDRFNASLGTYHDLLKIIKDKDFLDNEENEDILEDIVLTLTLFEDREMIEERLKTYAHLFDDKVMKQLKRRRYTGWGRLSRKLINGIRDKQSGKTILDFLKSDGFANRNFMQLIHDDSLTFKEDIQKAQVSGQGDSLHEHIANLAGSPAIKKGILQTVKVVDELVKVMGRHKPENIVIEMARENQTTQKGQKNSRERMKRIEEGIKELGSQILKEHPVENTQLQNEKLYLYYLQNGRDMYVDQELDINRLSDYDVDAIVPQSFLKDDSIDNKVLTRSDKNRGKSDNVPSEEVVKKMKNYWRQLLNAKLITQRKFDNLTKAERGGLSELDKAGFIKRQLVETRQITKHVAQILDSRMNTKYDENDKLIREVKVITLKSKLVSDFRKDFQFYKVREINNYHHAHDAYLNAVVGTALIKKYPKLESEFVYGDYKVYDVRKMIAKSEQEIGKATAKYFFYSNIMNFFKTEITLANGEIRKRPLIETNGETGEIVWDKGRDFATVRKVLSMPQVNIVKKTEVQTGGFSKESILPKRNSDKLIARKKDWDPKKYGGFDSPTVAYSVLVVAKVEKGKSKKLKSVKELLGITIMERSSFEKNPIDFLEAKGYKEVKKDLIIKLPKYSLFELENGRKRMLASAGELQKGNELALPSKYVNFLYLASHYEKLKGSPEDNEQKQLFVEQHKHYLDEIIEQISEFSKRVILADANLDKVLSAYNKHRDKPIREQAENIIHLFTLTNLGAPAAFKYFDTTIDRKRYTSTKEVLDATLIHQSITGLYETRIDLSQLGGDGSNSKKRSLEDNETEIKVSRDTWNTKNMRSLEPPRSKKRIHLEDYKDHDGDYKDHDIDYKDDDD

SEQ ID NO: 151 - protein, 1795 aa, Artificial Sequence
  chemically synthesized
MPKKKRKVSSFLDGIDKAQDEHEKYHSNWRAMASDFNLPPVVAKEIVASCDKCQLKGEAMHGQVDCSPGIWQLDCTHLEGKVILVAVHVASGYIEAEVIPAETGQETAYFLLKLAGRWPVKTIHTDNGSNFTGATVRAACWWAGIKQEFGIPYNPQSQGVVESMNKELKKIIGQVRDQAEHLKTAVQMAVFIHNFKRKGGIGGYSAGERIVDIIATDIQTKELQKQITKIQNGGGGSGGGGSGGGGSDKKYSIGLAIGTNSVGWAVITDEYKVPSKKFKVLGNTDRHSIKKNLIGALLFDSGETAEATRLKRTARRRYTRRKNRICYLQEIFSNEMAKVDDSFFHRLEESFLVEEDKKHERHPIFGNIVDEVAYHEKYPTIYHLRKKLVDSTDKADLRLIYLALAHMIKFRGHFLIEGDLNPDNSDVDKLFIQLVQTYNQLFEENPINASGVDAKAILSARLSKSRRLENLIAQLPGEKKNGLFGNLIALSLGLTPNFKSNFDLAEDAKLQLSKDTYDDDLDNLLAQIGDQYADLFLAAKNLSDAILLSDILRVNTEITKAPLSASMIKRYDEHHQDLTLLKALVRQQLPEKYKEIFFDQSKNGYAGYIDGGASQEEFYKFIKPILEKMDGTEELLVKLNREDLLRKQRTFDNGSIPHQIHLGELHAILRRQEDFYPFLKDNREKIEKILTFRIPYYVGPLARGNSRFAWMTRKSEETITPWNFEEVVDKGASAQSFIERMTNFDKNLPNEKVLPKHSLLYEYFTVYNELTKVKYVTEGMRKPAFLSGEQKKAIVDLLFKTNRKVTVKQLKEDYFKKIECFDSVEISGVEDRFNASLGTYHDLLKIIKDKDFLDNEENEDILEDIVLTLTLFEDREMIEERLKTYAHLFDDKVMKQLKRRRYTGWGRLSRKLINGIRDKQSGKTILDFLKSDGFANRNFMQLIHDDSLTFKEDIQKAQVSGQGDSLHEHIANLAGSPAIKKGILQTVKVVDELVKVMGRHKPENIVIEMARENQTTQKGQKNSRERMKRIEEGIKELGSQILKEHPVENTQLQNEKLYLYYLQNGRDMYVDQELDINRLSDYDVDAIVPQSFLKDDSIDNKVLTRSDKNRGKSDNVPSEEVVKKMKNYWRQLLNAKLITQRKFDNLTKAERGGLSELDKAGFIKRQLVETRQITKHVAQILDSRMNTKYDENDKLIREVKVITLKSKLVSDFRKDFQFYKVREINNYHHAHDAYLNAVVGTALIKKYPKLESEFVYGDYKVYDVRKMIAKSEQEIGKATAKYFFYSNIMNFFKTEITLANGEIRKRPLIETNGETGEIVWDKGRDFATVRKVLSMPQVNIVKKTEVQTGGFSKESILPKRNSDKLIARKKDWDPKKYGGFDSPTVAYSVLVVAKVEKGKSKKLKSVKELLGITIMERSSFEKNPIDFLEAKGYKEVKKDLIIKLPKYSLFELENGRKRMLASAGELQKGNELALPSKYVNFLYLASHYEKLKGSPEDNEQKQLFVEQHKHYLDEIIEQISEFSKRVILADANLDKVLSAYNKHRDKPIREQAENIIHLFTLTNLGAPAAFKYFDTTIDRKRYTSTKEVLDATLIHQSITGLYETRIDLSQLGGDGSNSKKRSLEDNETEIKVSRDTWNTKNMRSLEPPRSKKRIHLEDYKDHDGDYKDHDIDYKDDDDKLVSAGIRKVLFLDGIDKAQDMEQAPEDQGPQREPHNEWTLELLEELKNEAVRHFPRIWLHGLGQHIYETYGDTWAGVEAIIRILQQLLFIHFRIGCRHSRIGVTQQRRARNGASRS

SEQ ID NO: 152 - protein, 96 aa, Artificial Sequence
  chemically synthesized
MEQAPEDQGPQREPHNEWTLELLEELKNEAVRHFPRIWLHGLGQHIYETYGDTWAGVEAIIRILQQLLFIHFRIGCRHSRIGVTQQRRARNGASRS

SEQ ID NO: 153 - DNA, 4101 bp, Artificial Sequence
  chemically synthesized
gacaagaagtacagcatcggcctggacatcggcaccaactctgtgggctgggccgtgatcaccgacgagtacaaggtgcccagcaagaaattcaaggtgctgggcaacaccgaccggcacagcatcaagaagaacctgatcggagccctgctgttcgacagcggcgaaacagccgaggccacccggctgaagagaaccgccagaagaagatacaccagacggaagaaccggatctgctatctgcaagagatcttcagcaacgagatggccaaggtggacgacagcttcttccacagactggaagagtccttcctggtggaagaggataagaagcacgagcggcaccccatcttcggcaacatcgtggacgaggtggcctaccacgagaagtaccccaccatctaccacctgagaaagaaactggtggacagcaccgacaaggccgacctgcggctgatctatctggccctggcccacatgatcaagttccggggccacttcctgatcgagggcgacctgaaccccgacaacagcgacgtggacaagctgttcatccagctggtgcagacctacaaccagctgttcgaggaaaaccccatcaacgccagcggcgtggacgccaaggccatcctgtctgccagactgagcaagagcagacggctggaaaatctgatcgcccagctgcccggcgagaagaagaatggcctgttcggaaacctgattgccctgagcctgggcctgacccccaacttcaagagcaacttcgacctggccgaggatgccaaactgcagctgagcaaggacacctacgacgacgacctggacaacctgctggcccagatcggcgaccagtacgccgacctgtttctggccgccaagaacctgtccgacgccatcctgctgagcgacatcctgagagtgaacaccgagatcaccaaggcccccctgagcgcctctatgatcaagagatacgacgagcaccaccaggacctgaccctgctgaaagctctcgtgcggcagcagctgcctgagaagtacaaagagattttcttcgaccagagcaagaacggctacgccggctacattgacggcggagccagccaggaagagttctacaagttcatcaagcccatcctggaaaagatggacggcaccgaggaactgctcgtgaagctgaacagagaggacctgctgcggaagcagcggaccttcgacaacggcagcatcccccaccagatccacctgggagagctgcacgccattctgcggcggcaggaagatttttacccattcctgaaggacaaccgggaaaagatcgagaagatcctgaccttccgcatcccctactacgtgggccctctggccaggggaaacagcagattcgcctggatgaccagaaagagcgaggaaaccatcaccccctggaacttcgaggaagtggtggacaagggcgcttccgcccagagcttcatcgagcggatgaccaacttcgataagaacctgcccaacgagaaggtgctgcccaagcacagcctgctgtacgagtacttcaccgtgtataacgagctgaccaaagtgaaatacgtgaccgagggaatgagaaagcccgccttcctgagcggcgagcagaaaaaggccatcgtggacctgctgttcaagaccaaccggaaagtgaccgtgaagcagctgaaagaggactacttcaagaaaatcgagtgcttcgactccgtggaaatctccggcgtggaagatcggttcaacgcctccctgggcacataccacgatctgctgaaaattatcaaggacaaggacttcctggacaatgaggaaaacgaggacattctggaagatatcgtgctgaccctgacactgtttgaggacagagagatgatcgaggaacggctgaaaacctatgcccacctgttcgacgacaaagtgatgaagcagctgaagcggcggagatacaccggctggggcaggctgagccggaagctgatcaacggcatccgggacaagcagtccggcaagacaatcctggatttcctgaagtccgacggcttcgccaacagaaacttcatgcagctgatccacgacgacagcctgacctttaaagaggacatccagaaagcccaggtgtccggccagggcgatagcctgcacgagcacattgccaatctggccggcagccccgccattaagaagggcatcctgcagacagtgaaggtggtggacgagctcgtgaaagtgatgggccggcacaagcccgagaacatcgtgatcgaaatggccagagagaaccagaccacccagaagggacagaagaacagccgcgagagaatgaagcggatcgaagagggcatcaaagagctgggcagccagatcctgaaagaacaccccgtggaaaacacccagctgcagaacgagaagctgtacctgtactacctgcagaatgggcgggatatgtacgtggaccaggaactggacatcaaccggctgtccgactacgatgtggaccatatcgtgcctcagagctttctgaaggacgactccatcgacaacaaggtgctgaccagaagcgacaagaaccggggcaagagcgacaacgtgccctccgaagaggtcgtgaagaagatgaagaactactggcggcagctgctgaacgccaagctgattacccagagaaagttcgacaatctgaccaaggccgagagaggcggcctgagcgaactggataaggccggcttcatcaagagacagctggtggaaacccggcagatcacaaagcacgtggcacagatcctggactcccggatgaacactaagtacgacgagaatgacaagctgatccgggaagtgaaagtgatcaccctgaagtccaagctggtgtccgatttccggaaggatttccagttttacaaagtgcgcgagatcaacaactaccaccacgcccacgacgcctacctgaacgccgtcgtgggaaccgccctgatcaaaaagtaccctaagctggaaagcgagttcgtgtacggcgactacaaggtgtacgacgtgcggaagatgatcgccaagagcgagcaggaaatcggcaaggctaccgccaagtacttcttctacagcaacatcatgaactttttcaagaccgagattaccctggccaacggcgagatccggaagcggcctctgatcgagacaaacggcgaaaccggggagatcgtgtgggataagggccgggattttgccaccgtgcggaaagtgctgagcatgccccaagtgaatatcgtgaaaaagaccgaggtgcagacaggcggcttcagcaaagagtctatcctgcccaagaggaacagcgataagctgatcgccagaaagaaggactgggaccctaagaagtacggcggcttcgacagccccaccgtggcctattctgtgctggtggtggccaaagtggaaaagggcaagtccaagaaactgaagagtgtgaaagagctgctggggatcaccatcatggaaagaagcagcttcgagaagaatcccatcgactttctggaagccaagggctacaaagaagtgaaaaaggacctgatcatcaagctgcctaagtactccctgttcgagctggaaaacggccggaagagaatgctggcctctgccggcgaactgcagaagggaaacgaactggccctgccctccaaatatgtgaacttcctgtacctggccagccactatgagaagctgaagggctcccccgaggataatgagcagaaacagctgtttgtggaacagcacaagcactacctggacgagatcatcgagcagatcagcgagttctccaagagagtgatcctggccgacgctaatctggacaaagtgctgtccgcctacaacaagcaccgggataagcccatcagagagcaggccgagaatatcatccacctgtttaccctgaccaatctgggagcccctgccgccttcaagtactttgacaccaccatcgaccggaagaggtacaccagcaccaaagaggtgctggacgccaccctgatccaccagagcatcaccggcctgtacgagacacggatcgacctgtctcagctgggaggcgac

SEQ ID NO: 154 - DNA, 4101 bp, Artificial Sequence
  chemically synthesized
gataaaaagtattctattggtttagccatcggcactaattccgttggatgggctgtcataaccgatgaatacaaagtaccttcaaagaaatttaaggtgttggggaacacagaccgtcattcgattaaaaagaatcttatcggtgccctcctattcgatagtggcgaaacggcagaggcgactcgcctgaaacgaaccgctcggagaaggtatacacgtcgcaagaaccgaatatgttacttacaagaaatttttagcaatgagatggccaaagttgacgattctttctttcaccgtttggaagagtccttccttgtcgaagaggacaagaaacatgaacggcaccccatctttggaaacatagtagatgaggtggcatatcatgaaaagtacccaacgatttatcacctcagaaaaaagctagttgactcaactgataaagcggacctgaggttaatctacttggctcttgcccatatgataaagttccgtgggcactttctcattgagggtgatctaaatccggacaactcggatgtcgacaaactgttcatccagttagtacaaacctataatcagttgtttgaagagaaccctataaatgcaagtggcgtggatgcgaaggctattcttagcgcccgcctctctaaatcccgacggctagaaaacctgatcgcacaattacccggagagaagaaaaatgggttgttcggtaaccttatagcgctctcactaggcctgacaccaaattttaagtcgaacttcgacttagctgaagatgccaaattgcagcttagtaaggacacgtacgatgacgatctcgacaatctactggcacaaattggagatcagtatgcggacttatttttggctgccaaaaaccttagcgatgcaatcctcctatctgacatactgagagttaatactgagattaccaaggcgccgttatccgcttcaatgatcaaaaggtacgatgaacatcaccaagacttgacacttctcaaggccctagtccgtcagcaactgcctgagaaatataaggaaatattctttgatcagtcgaaaaacgggtacgcaggttatattgacggcggagcgagtcaagaggaattctacaagtttatcaaacccatattagagaagatggatgggacggaagagttgcttgtaaaactcaatcgcgaagatctactgcgaaagcagcggactttcgacaacggtagcattccacatcaaatccacttaggcgaattgcatgctatacttagaaggcaggaggatttttatccgttcctcaaagacaatcgtgaaaagattgagaaaatcctaacctttcgcataccttactatgtgggacccctggcccgagggaactctcggttcgcatggatgacaagaaagtccgaagaaacgattactccatggaattttgaggaagttgtcgataaaggtgcgtcagctcaatcgttcatcgagaggatgaccaactttgacaagaatttaccgaacgaaaaagtattgcctaagcacagtttactttacgagtatttcacagtgtacaatgaactcacgaaagttaagtatgtcactgagggcatgcgtaaacccgcctttctaagcggagaacagaagaaagcaatagtagatctgttattcaagaccaaccgcaaagtgacagttaagcaattgaaagaggactactttaagaaaattgaatgcttcgattctgtcgagatctccggggtagaagatcgatttaatgcgtcacttggtacgtatcatgacctcctaaagataattaaagataaggacttcctggataacgaagagaatgaagatatcttagaagatatagtgttgactcttaccctctttgaagatcgggaaatgattgaggaaagactaaaaacatacgctcacctgttcgacgataaggttatgaaacagttaaagaggcgtcgctatacgggctggggacgattgtcgcggaaacttatcaacgggataagagacaagcaaagtggtaaaactattctcgattttctaaagagcgacggcttcgccaataggaactttatgcagctgatccatgatgactctttaaccttcaaagaggatatacaaaaggcacaggtttccggacaaggggactcattgcacgaacatattgcgaatcttgctggttcgccagccatcaaaaagggcatactccagacagtcaaagtagtggatgagctagttaaggtcatgggacgtcacaaaccggaaaacattgtaatcgagatggcacgcgaaaatcaaacgactcagaaggggcaaaaaaacagtcgagagcggatgaagagaatagaagagggtattaaagaactgggcagccagatcttaaaggagcatcctgtggaaaatacccaattgcagaacgagaaactttacctctattacctacaaaatggaagggacatgtatgttgatcaggaactggacataaaccgtttatctgattacgacgtcgatgccattgtaccccaatcctttttgaaggacgattcaatcgacaataaagtgcttacacgctcggataagaaccgagggaaaagtgacaatgttccaagcgaggaagtcgtaaagaaaatgaagaactattggcggcagctcctaaatgcgaaactgataacgcaaagaaagttcgataacttaactaaagctgagaggggtggcttgtctgaacttgacaaggccggatttattaaacgtcagctcgtggaaacccgccaaatcacaaagcatgttgcacagatactagattcccgaatgaatacgaaatacgacgagaacgataagctgattcgggaagtcaaagtaatcactttaaagtcaaaattggtgtcggacttcagaaaggattttcaattctataaagttagggagataaataactaccaccatgcgcacgacgcttatcttaatgccgtcgtagggaccgcactcattaagaaatacccgaagctagaaagtgagtttgtgtatggtgattacaaagtttatgacgtccgtaagatgatcgcgaaaagcgaacaggagataggcaaggctacagccaaatacttcttttattctaacattatgaatttctttaagacggaaatcactctggcaaacggagagatacgcaaacgacctttaattgaaaccaatggggagacaggtgaaatcgtatgggataagggccgggacttcgcgacggtgagaaaagttttgtccatgccccaagtcaacatagtaaagaaaactgaggtgcagaccggagggttttcaaaggaatcgattcttccaaaaaggaatagtgataagctcatcgctcgtaaaaaggactgggacccgaaaaagtacggtggcttcgatagccctacagttgcctattctgtcctagtagtggcaaaagttgagaagggaaaatccaagaaactgaagtcagtcaaagaattattggggataacgattatggagcgctcgtcttttgaaaagaaccccatcgacttccttgaggcgaaaggttacaaggaagtaaaaaaggatctcataattaaactaccaaagtatagtctgtttgagttagaaaatggccgaaaacggatgttggctagcgccggagagcttcaaaaggggaacgaactcgcactaccgtctaaatacgtgaatttcctgtatttagcgtcccattacgagaagttgaaaggttcacctgaagataacgaacagaagcaactttttgttgagcagcacaaacattatctcgacgaaatcatagagcaaatttcggaattcagtaagagagtcatcctagctgatgccaatctggacaaagtattaagcgcatacaacaagcacagggataaacccatacgtgagcaggcggaaaatattatccatttgtttactcttaccaacctcggcgctccagccgcattcaagtattttgacacaacgatagatcgcaaacgatacacttctaccaaggaggtgctagacgcgacactgattcaccaatccatcacgggattatatgaaactcggatagatttgtcacagcttgggggtgac

SEQ ID NO: 155 - DNA, 3156 bp, Artificial Sequence
  chemically synthesized
aagcggaactacatcctgggcctggacatcggcatcaccagcgtgggctacggcatcatcgactacgagacacgggacgtgatcgatgccggcgtgcggctgttcaaagaggccaacgtggaaaacaacgagggcaggcggagcaagagaggcgccagaaggctgaagcggcggaggcggcatagaatccagagagtgaagaagctgctgttcgactacaacctgctgaccgaccacagcgagctgagcggcatcaacccctacgaggccagagtgaagggcctgagccagaagctgagcgaggaagagttctctgccgccctgctgcacctggccaagagaagaggcgtgcacaacgtgaacgaggtggaagaggacaccggcaacgagctgtccaccaaagagcagatcagccggaacagcaaggccctggaagagaaatacgtggccgaactgcagctggaacggctgaagaaagacggcgaagtgcggggcagcatcaacagattcaagaccagcgactacgtgaaagaagccaaacagctgctgaaggtgcagaaggcctaccaccagctggaccagagcttcatcgacacctacatcgacctgctggaaacccggcggacctactatgagggacctggcgagggcagccccttcggctggaaggacatcaaagaatggtacgagatgctgatgggccactgcacctacttccccgaggaactgcggagcgtgaagtacgcctacaacgccgacctgtacaacgccctgaacgacctgaacaatctcgtgatcaccagggacgagaacgagaagctggaatattacgagaagttccagatcatcgagaacgtgttcaagcagaagaagaagcccaccctgaagcagatcgccaaagaaatcctcgtgaacgaagaggatattaagggctacagagtgaccagcaccggcaagcccgagttcaccaacctgaaggtgtaccacgacatcaaggacattaccgcccggaaagagattattgagaacgccgagctgctggatcagattgccaagatcctgaccatctaccagagcagcgaggacatccaggaagaactgaccaatctgaactccgagctgacccaggaagagatcgagcagatctctaatctgaagggctataccggcacccacaacctgagcctgaaggccatcaacctgatcctggacgagctgtggcacaccaacgacaaccagatcgctatcttcaaccggctgaagctggtgcccaagaaggtggacctgtcccagcagaaagagatccccaccaccctggtggacgacttcatcctgagccccgtcgtgaagagaagcttcatccagagcatcaaagtgatcaacgccatcatcaagaagtacggcctgcccaacgacatcattatcgagctggcccgcgagaagaactccaaggacgcccagaaaatgatcaacgagatgcagaagcggaaccggcagaccaacgagcggatcgaggaaatcatccggaccaccggcaaagagaacgccaagtacctgatcgagaagatcaagctgcacgacatgcaggaaggcaagtgcctgtacagcctggaagccatccctctggaagatctgctgaacaaccccttcaactatgaggtggaccacatcatccccagaagcgtgtccttcgacaacagcttcaacaacaaggtgctcgtgaagcaggaagaaaacagcaagaagggcaaccggaccccattccagtacctgagcagcagcgacagcaagatcagctacgaaaccttcaagaagcacatcctgaatctggccaagggcaagggcagaatcagcaagaccaagaaagagtatctgctggaagaacgggacatcaacaggttctccgtgcagaaagacttcatcaaccggaacctggtggataccagatacgccaccagaggcctgatgaacctgctgcggagctacttcagagtgaacaacctggacgtgaaagtgaagtccatcaatggcggcttcaccagctttctgcggcggaagtggaagtttaagaaagagcggaacaaggggtacaagcaccacgccgaggacgccctgatcattgccaacgccgatttcatcttcaaagagtggaagaaactggacaaggccaaaaaagtgatggaaaaccagatgttcgaggaaaagcaggccgagagcatgcccgagatcgaaaccgagcaggagtacaaagagatcttcatcaccccccaccagatcaagcacattaaggacttcaaggactacaagtacagccaccgggtggacaagaagcctaatagagagctgattaacgacaccctgtactccacccggaaggacgacaagggcaacaccctgatcgtgaacaatctgaacggcctgtacgacaaggacaatgacaagctgaaaaagctgatcaacaagagccccgaaaagctgctgatgtaccaccacgacccccagacctaccagaaactgaagctgattatggaacagtacggcgacgagaagaatcccctgtacaagtactacgaggaaaccgggaactacctgaccaagtactccaaaaaggacaacggccccgtgatcaagaagattaagtattacggcaacaaactgaacgcccatctggacatcaccgacgactaccccaacagcagaaacaaggtcgtgaagctgtccctgaagccctacagattcgacgtgtacctggacaatggcgtgtacaagttcgtgaccgtgaagaatctggatgtgatcaaaaaagaaaactactacgaagtgaatagcaagtgctatgaggaagctaagaagctgaagaagatcagcaaccaggccgagtttatcgcctccttctacaacaacgatctgatcaagatcaacggcgagctgtatagagtgatcggcgtgaacaacgacctgctgaaccggatcgaagtgaacatgatcgacatcacctaccgcgagtacctggaaaacatgaacgacaagaggccccccaggatcattaagacaatcgcctccaagacccagagcattaagaagtacagcacagacattctgggcaacctgtatgaagtgaaatctaagaagcaccctcagatcatcaaaaagggc

SEQ ID NO: 156 - DNA, 3156 bp, Artificial Sequence
  chemically synthesized
aagcggaactacatcctgggcctggccatcggcatcaccagcgtgggctacggcatcatcgactacgagacacgggacgtgatcgatgccggcgtgcggctgttcaaagaggccaacgtggaaaacaacgagggcaggcggagcaagagaggcgccagaaggctgaagcggcggaggcggcatagaatccagagagtgaagaagctgctgttcgactacaacctgctgaccgaccacagcgagctgagcggcatcaacccctacgaggccagagtgaagggcctgagccagaagctgagcgaggaagagttctctgccgccctgctgcacctggccaagagaagaggcgtgcacaacgtgaacgaggtggaagaggacaccggcaacgagctgtccaccaaagagcagatcagccggaacagcaaggccctggaagagaaatacgtggccgaactgcagctggaacggctgaagaaagacggcgaagtgcggggcagcatcaacagattcaagaccagcgactacgtgaaagaagccaaacagctgctgaaggtgcagaaggcctaccaccagctggaccagagcttcatcgacacctacatcgacctgctggaaacccggcggacctactatgagggacctggcgagggcagccccttcggctggaaggacatcaaagaatggtacgagatgctgatgggccactgcacctacttccccgaggaactgcggagcgtgaagtacgcctacaacgccgacctgtacaacgccctgaacgacctgaacaatctcgtgatcaccagggacgagaacgagaagctggaatattacgagaagttccagatcatcgagaacgtgttcaagcagaagaagaagcccaccctgaagcagatcgccaaagaaatcctcgtgaacgaagaggatattaagggctacagagtgaccagcaccggcaagcccgagttcaccaacctgaaggtgtaccacgacatcaaggacattaccgcccggaaagagattattgagaacgccgagctgctggatcagattgccaagatcctgaccatctaccagagcagcgaggacatccaggaagaactgaccaatctgaactccgagctgacccaggaagagatcgagcagatctctaatctgaagggctataccggcacccacaacctgagcctgaaggccatcaacctgatcctggacgagctgtggcacaccaacgacaaccagatcgctatcttcaaccggctgaagctggtgcccaagaaggtggacctgtcccagcagaaagagatccccaccaccctggtggacgacttcatcctgagccccgtcgtgaagagaagcttcatccagagcatcaaagtgatcaacgccatcatcaagaagtacggcctgcccaacgacatcattatcgagctggcccgcgagaagaactccaaggacgcccagaaaatgatcaacgagatgcagaagcggaaccggcagaccaacgagcggatcgaggaaatcatccggaccaccggcaaagagaacgccaagtacctgatcgagaagatcaagctgcacgacatgcaggaaggcaagtgcctgtacagcctggaagccatccctctggaagatctgctgaacaaccccttcaactatgaggtggaccacatcatccccagaagcgtgtccttcgacaacagcttcaacaacaaggtgctcgtgaagcaggaagaagccagcaagaagggcaaccggaccccattccagtacctgagcagcagcgacagcaagatcagctacgaaaccttcaagaagcacatcctgaatctggccaagggcaagggcagaatcagcaagaccaagaaagagtatctgctggaagaacgggacatcaacaggttctccgtgcagaaagacttcatcaaccggaacctggtggataccagatacgccaccagaggcctgatgaacctgctgcggagctacttcagagtgaacaacctggacgtgaaagtgaagtccatcaatggcggcttcaccagctttctgcggcggaagtggaagtttaagaaagagcggaacaaggggtacaagcaccacgccgaggacgccctgatcattgccaacgccgatttcatcttcaaagagtggaagaaactggacaaggccaaaaaagtgatggaaaaccagatgttcgaggaaaagcaggccgagagcatgcccgagatcgaaaccgagcaggagtacaaagagatcttcatcaccccccaccagatcaagcacattaaggacttcaaggactacaagtacagccaccgggtggacaagaagcctaatagagagctgattaacgacaccctgtactccacccggaaggacgacaagggcaacaccctgatcgtgaacaatctgaacggcctgtacgacaaggacaatgacaagctgaaaaagctgatcaacaagagccccgaaaagctgctgatgtaccaccacgacccccagacctaccagaaactgaagctgattatggaacagtacggcgacgagaagaatcccctgtacaagtactacgaggaaaccgggaactacctgaccaagtactccaaaaaggacaacggccccgtgatcaagaagattaagtattacggcaacaaactgaacgcccatctggacatcaccgacgactaccccaacagcagaaacaaggtcgtgaagctgtccctgaagccctacagattcgacgtgtacctggacaatggcgtgtacaagttcgtgaccgtgaagaatctggatgtgatcaaaaaagaaaactactacgaagtgaatagcaagtgctatgaggaagctaagaagctgaagaagatcagcaaccaggccgagtttatcgcctccttctacaacaacgatctgatcaagatcaacggcgagctgtatagagtgatcggcgtgaacaacgacctgctgaaccggatcgaagtgaacatgatcgacatcacctaccgcgagtacctggaaaacatgaacgacaagaggccccccaggatcattaagacaatcgcctccaagacccagagcattaagaagtacagcacagacattctgggcaacctgtatgaagtgaaatctaagaagcaccctcagatcatcaaaaagggc

SEQ ID NO: 157 - DNA, 3681 bp, Artificial Sequence
  chemically synthesized
agcaagctggagaagtttacaaactgctactccctgtctaagaccctgaggttcaaggccatccctgtgggcaagacccaggagaacatcgacaataagcggctgctggtggaggacgagaagagagccgaggattataagggcgtgaagaagctgctggatcgctactatctgtcttttatcaacgacgtgctgcacagcatcaagctgaagaatctgaacaattacatcagcctgttccggaagaaaaccagaaccgagaaggagaataaggagctggagaacctggagatcaatctgcggaaggagatcgccaaggccttcaagggcaacgagggctacaagtccctgtttaagaaggatatcatcgagacaatcctgccagagttcctggacgataaggacgagatcgccctggtgaacagcttcaatggctttaccacagccttcaccggcttctttgataacagagagaatatgttttccgaggaggccaagagcacatccatcgccttcaggtgtatcaacgagaatctgacccgctacatctctaatatggacatcttcgagaaggtggacgccatctttgataagcacgaggtgcaggagatcaaggagaagatcctgaacagcgactatgatgtggaggatttctttgagggcgagttctttaactttgtgctgacacaggagggcatcgacgtgtataacgccatcatcggcggcttcgtgaccgagagcggcgagaagatcaagggcctgaacgagtacatcaacctgtataatcagaaaaccaagcagaagctgcctaagtttaagccactgtataagcaggtgctgagcgatcgggagtctctgagcttctacggcgagggctatacatccgatgaggaggtgctggaggtgtttagaaacaccctgaacaagaacagcgagatcttcagctccatcaagaagctggagaagctgttcaagaattttgacgagtactctagcgccggcatctttgtgaagaacggccccgccatcagcacaatctccaaggatatcttcggcgagtggaacgtgatccgggacaagtggaatgccgagtatgacgatatccacctgaagaagaaggccgtggtgaccgagaagtacgaggacgatcggagaaagtccttcaagaagatcggctccttttctctggagcagctgcaggagtacgccgacgccgatctgtctgtggtggagaagctgaaggagatcatcatccagaaggtggatgagatctacaaggtgtatggctcctctgagaagctgttcgacgccgattttgtgctggagaagagcctgaagaagaacgacgccgtggtggccatcatgaaggacctgctggattctgtgaagagcttcgagaattacatcaaggccttctttggcgagggcaaggagacaaacagggacgagtccttctatggcgattttgtgctggcctacgacatcctgctgaaggtggaccacatctacgatgccatccgcaattatgtgacccagaagccctactctaaggataagttcaagctgtattttcagaaccctcagttcatgggcggctgggacaaggataaggagacagactatcgggccaccatcctgagatacggctccaagtactatctggccatcatggataagaagtacgccaagtgcctgcagaagatcgacaaggacgatgtgaacggcaattacgagaagatcaactataagctgctgcccggccctaataagatgctgccaaaggtgttcttttctaagaagtggatggcctactataaccccagcgaggacatccagaagatctacaagaatggcacattcaagaagggcgatatgtttaacctgaatgactgtcacaagctgatcgacttctttaaggatagcatctcccggtatccaaagtggtccaatgcctacgatttcaacttttctgagacagagaagtataaggacatcgccggcttttacagagaggtggaggagcagggctataaggtgagcttcgagtctgccagcaagaaggaggtggataagctggtggaggagggcaagctgtatatgttccagatctataacaaggacttttccgataagtctcacggcacacccaatctgcacaccatgtacttcaagctgctgtttgacgagaacaatcacggacagatcaggctgagcggaggagcagagctgttcatgaggcgcgcctccctgaagaaggaggagctggtggtgcacccagccaactcccctatcgccaacaagaatccagataatcccaagaaaaccacaaccctgtcctacgacgtgtataaggataagaggttttctgaggaccagtacgagctgcacatcccaatcgccatcaataagtgccccaagaacatcttcaagatcaatacagaggtgcgcgtgctgctgaagcacgacgataacccctatgtgatcggcatcgataggggcgagcgcaatctgctgtatatcgtggtggtggacggcaagggcaacatcgtggagcagtattccctgaacgagatcatcaacaacttcaacggcatcaggatcaagacagattaccactctctgctggacaagaaggagaaggagaggttcgaggcccgccagaactggacctccatcgagaatatcaaggagctgaaggccggctatatctctcaggtggtgcacaagatctgcgagctggtggagaagtacgatgccgtgatcgccctggaggacctgaactctggctttaagaatagccgcgtgaaggtggagaagcaggtgtatcagaagttcgagaagatgctgatcgataagctgaactacatggtggacaagaagtctaatccttgtgcaacaggcggcgccctgaagggctatcagatcaccaataagttcgagagctttaagtccatgtctacccagaacggcttcatcttttacatccctgcctggctgacatccaagatcgatccatctaccggctttgtgaacctgctgaaaaccaagtataccagcatcgccgattccaagaagttcatcagctcctttgacaggatcatgtacgtgcccgaggaggatctgttcgagtttgccctggactataagaacttctctcgcacagacgccgattacatcaagaagtggaagctgtactcctacggcaaccggatcagaatcttccggaatcctaagaagaacaacgtgttcgactgggaggaggtgtgcctgaccagcgcctataaggagctgttcaacaagtacggcatcaattatcagcagggcgatatcagagccctgctgtgcgagcagtccgacaaggccttctactctagctttatggccctgatgagcctgatgctgcagatgcggaacagcatcacaggccgcaccgacgtggattttctgatcagccctgtgaagaactccgacggcatcttctacgatagccggaactatgaggcccaggagaatgccatcctgccaaagaacgccgacgccaatggcgcctataacatcgccagaaaggtgctgtgggccatcggccagttcaagaaggccgaggacgagaagctggataaggtgaagatcgccatctctaacaaggagtggctggagtacgcccagaccagcgtgaagcac

SEQ ID NO: 158 - DNA, 3681 bp, Artificial Sequence
  chemically synthesized
agcaagctggagaagtttacaaactgctactccctgtctaagaccctgaggttcaaggccatccctgtgggcaagacccaggagaacatcgacaataagcggctgctggtggaggacgagaagagagccgaggattataagggcgtgaagaagctgctggatcgctactatctgtcttttatcaacgacgtgctgcacagcatcaagctgaagaatctgaacaattacatcagcctgttccggaagaaaaccagaaccgagaaggagaataaggagctggagaacctggagatcaatctgcggaaggagatcgccaaggccttcaagggcaacgagggctacaagtccctgtttaagaaggatatcatcgagacaatcctgccagagttcctggacgataaggacgagatcgccctggtgaacagcttcaatggctttaccacagccttcaccggcttctttgataacagagagaatatgttttccgaggaggccaagagcacatccatcgccttcaggtgtatcaacgagaatctgacccgctacatctctaatatggacatcttcgagaaggtggacgccatctttgataagcacgaggtgcaggagatcaaggagaagatcctgaacagcgactatgatgtggaggatttctttgagggcgagttctttaactttgtgctgacacaggagggcatcgacgtgtataacgccatcatcggcggcttcgtgaccgagagcggcgagaagatcaagggcctgaacgagtacatcaacctgtataatcagaaaaccaagcagaagctgcctaagtttaagccactgtataagcaggtgctgagcgatcgggagtctctgagcttctacggcgagggctatacatccgatgaggaggtgctggaggtgtttagaaacaccctgaacaagaacagcgagatcttcagctccatcaagaagctggagaagctgttcaagaattttgacgagtactctagcgccggcatctttgtgaagaacggccccgccatcagcacaatctccaaggatatcttcggcgagtggaacgtgatccgggacaagtggaatgccgagtatgacgatatccacctgaagaagaaggccgtggtgaccgagaagtacgaggacgatcggagaaagtccttcaagaagatcggctccttttctctggagcagctgcaggagtacgccgacgccgatctgtctgtggtggagaagctgaaggagatcatcatccagaaggtggatgagatctacaaggtgtatggctcctctgagaagctgttcgacgccgattttgtgctggagaagagcctgaagaagaacgacgccgtggtggccatcatgaaggacctgctggattctgtgaagagcttcgagaattacatcaaggccttctttggcgagggcaaggagacaaacagggacgagtccttctatggcgattttgtgctggcctacgacatcctgctgaaggtggaccacatctacgatgccatccgcaattatgtgacccagaagccctactctaaggataagttcaagctgtattttcagaaccctcagttcatgggcggctgggacaaggataaggagacagactatcgggccaccatcctgagatacggctccaagtactatctggccatcatggataagaagtacgccaagtgcctgcagaagatcgacaaggacgatgtgaacggcaattacgagaagatcaactataagctgctgcccggccctaataagatgctgccaaaggtgttcttttctaagaagtggatggcctactataaccccagcgaggacatccagaagatctacaagaatggcacattcaagaagggcgatatgtttaacctgaatgactgtcacaagctgatcgacttctttaaggatagcatctcccggtatccaaagtggtccaatgcctacgatttcaacttttctgagacagagaagtataaggacatcgccggcttttacagagaggtggaggagcagggctataaggtgagcttcgagtctgccagcaagaaggaggtggataagctggtggaggagggcaagctgtatatgttccagatctataacaaggacttttccgataagtctcacggcacacccaatctgcacaccatgtacttcaagctgctgtttgacgagaacaatcacggacagatcaggctgagcggaggagcagagctgttcatgaggcgcgcctccctgaagaaggaggagctggtggtgcacccagccaactcccctatcgccaacaagaatccagataatcccaagaaaaccacaaccctgtcctacgacgtgtataaggataagaggttttctgaggaccagtacgagctgcacatcccaatcgccatcaataagtgccccaagaacatcttcaagatcaatacagaggtgcgcgtgctgctgaagcacgacgataacccctatgtgatcggcatcgctaggggcgagcgcaatctgctgtatatcgtggtggtggacggcaagggcaacatcgtggagcagtattccctgaacgagatcatcaacaacttcaacggcatcaggatcaagacagattaccactctctgctggacaagaaggagaaggagaggttcgaggcccgccagaactggacctccatcgagaatatcaaggagctgaaggccggctatatctctcaggtggtgcacaagatctgcgagctggtggagaagtacgatgccgtgatcgccctggaggacctgaactctggctttaagaatagccgcgtgaaggtggagaagcaggtgtatcagaagttcgagaagatgctgatcgataagctgaactacatggtggacaagaagtctaatccttgtgcaacaggcggcgccctgaagggctatcagatcaccaataagttcgagagctttaagtccatgtctacccagaacggcttcatcttttacatccctgcctggctgacatccaagatcgatccatctaccggctttgtgaacctgctgaaaaccaagtataccagcatcgccgattccaagaagttcatcagctcctttgacaggatcatgtacgtgcccgaggaggatctgttcgagtttgccctggactataagaacttctctcgcacagacgccgattacatcaagaagtggaagctgtactcctacggcaaccggatcagaatcttccggaatcctaagaagaacaacgtgttcgactgggaggaggtgtgcctgaccagcgcctataaggagctgttcaacaagtacggcatcaattatcagcagggcgatatcagagccctgctgtgcgagcagtccgacaaggccttctactctagctttatggccctgatgagcctgatgctgcagatgcggaacagcatcacaggccgcaccgacgtggattttctgatcagccctgtgaagaactccgacggcatcttctacgatagccggaactatgaggcccaggagaatgccatcctgccaaagaacgccgacgccaatggcgcctataacatcgccagaaaggtgctgtgggccatcggccagttcaagaaggccgaggacgagaagctggataaggtgaagatcgccatctctaacaaggagtggctggagtacgcccagaccagcgtgaagcac

SEQ ID NO: 159 - DNA, 1587 bp, Artificial Sequence
  chemically synthesized
gccaagaacactattacgaaaacactgaaacttcgaattgtccggccctacaatagtgcagaggtggagaaaatcgttgcagacgagaaaaacaaccgggagaaaatagccttggagaagaataaggataaggtcaaggaggcgtgctccaaacacctcaaagtagcggcgtactgcacgacacaggtggagcgaaacgcttgcctcttttgcaaagcccgcaaacttgacgacaagttctaccaaaagctgcgcggtcagtttcccgatgccgtattctggcaagagatctctgagatctttcgacagttgcagaagcaggcagctgagatatacaatcagtcacttatcgagttgtactacgaaatctttattaagggaaagggcatcgcaaatgcctcctctgtcgagcattatctctcagacgtgtgctatactcgggccgcggaactgttcaaaaacgcggccattgcgagcggtctgcgctctaagattaagagcaattttagattgaaagagctgaagaatatgaagtcaggactccccactaccaaatctgataattttcctatacccttggtaaagcaaaaaggcgggcaatatacaggatttgagattagtaatcataactcagatttcatcataaaaatccctttcggtcgctggcaggtcaagaaagagattgataaatatcggccttgggagaaatttgatttcgagcaagtgcagaaatcacccaaacctatctcattgttgttgtcaacgcagcggcgaaagcggaataagggttggagcaaggacgagggtacggaagctgagataaagaaagtgatgaatggcgattatcagaccagttacatagaagtgaaacggggctccaaaatatgcgagaaatccgcatggatgctcaaccttagcattgatgttcctaagatagacaagggtgtagacccgtctatcattgggggcatagacgtaggcgttaaaagtccactggtgtgcgccataaacaatgctttttctcgatatagtatatctgataatgatcttttccacttcaacaagaagatgtttgcccgacgaagaatacttttgaagaaaaataggcacaaaagggcaggtcatggggcgaagaacaaactgaagccgatcactattttgacggagaaatccgaacgattccgcaagaaactgatcgaacgctgggcatgtgagatagcagattttttcattaagaacaaggtagggaccgtacagatggagaatcttgagtcaatgaagaggaaggaggattcatactttaacatacgcctccgaggtttttggccctatgctgaaatgcaaaacaagatcgagttcaaactgaaacagtacggtatcgagattcgcaaagttgcgcccaataacaccagtaaaacctgctctaaatgtggtcacttgaataattattttaattttgaatacaggaagaaaaataaatttccacacttcaaatgcgagaaatgtaatttcaaggaaaatgcggactataacgctgccctgaacatttctaatccgaaactcaagtctacgaaggaggagccttag

SEQ ID NO: 160 - DNA, 1584 bp, Artificial Sequence
  chemically synthesized
gccaagaacactattacgaaaacactgaaacttcgaattgtccggccctacaatagtgcagaggtggagaaaatcgttgcagacgagaaaaacaaccgggagaaaatagccttggagaagaataaggataaggtcaaggaggcgtgctccaaacacctcaaagtagcggcgtactgcacgacacaggtggagcgaaacgcttgcctcttttgcaaagcccgcaaacttgacgacaagttctaccaaaagctgcgcggtcagtttcccgatgccgtattctggcaagagatctctgagatctttcgacagttgcagaagcaggcagctgagatatacaatcagtcacttatcgagttgtactacgaaatctttattaagggaaagggcatcgcaaatgcctcctctgtcgagcattatctctcagacgtgtgctatactcgggccgcggaactgttcaaaaacgcggccattgcgagcggtctgcgctctaagattaagagcaattttagattgaaagagctgaagaatatgaagtcaggactccccactaccaaatctgataattttcctatacccttggtaaagcaaaaaggcgggcaatatacaggatttgagattagtaatcataactcagatttcatcataaaaatccctttcggtcgctggcaggtcaagaaagagattgataaatatcggccttgggagaaatttgatttcgagcaagtgcagaaatcacccaaacctatctcattgttgttgtcaacgcagcggcgaaagcggaataagggttggagcaaggacgagggtacggaagctgagataaagaaagtgatgaatggcgattatcagaccagttacatagaagtgaaacggggctccaaaatatgcgagaaatccgcatggatgctcaaccttagcattgatgttcctaagatagacaagggtgtagacccgtctatcattgggggcatagccgtaggcgttaaaagtccactggtgtgcgccataaacaatgctttttctcgatatagtatatctgataatgatcttttccacttcaacaagaagatgtttgcccgacgaagaatacttttgaagaaaaataggcacaaaagggcaggtcatggggcgaagaacaaactgaagccgatcactattttgacggagaaatccgaacgattccgcaagaaactgatcgaacgctgggcatgtgagatagcagattttttcattaagaacaaggtagggaccgtacagatggagaatcttgagtcaatgaagaggaaggaggattcatactttaacatacgcctccgaggtttttggccctatgctgaaatgcaaaacaagatcgagttcaaactgaaacagtacggtatcgagattcgcaaagttgcgcccaataacaccagtaaaacctgctctaaatgtggtcacttgaataattattttaattttgaatacaggaagaaaaataaatttccacacttcaaatgcgagaaatgtaatttcaaggaaaatgcggcctataacgctgccctgaacatttctaatccgaaactcaagtctacgaaggaggagcct

SEQ ID NO: 161 - DNA, 864 bp, Artificial Sequence
  chemically synthesized
tttttggacggtattgacaaagctcaggacgaacatgaaaagtaccactctaactggagagctatggcctccgattttaatcttccgccggtggtagcgaaagaaatcgttgccagttgcgacaaatgccaattgaagggagaagccatgcatggtcaagtggattgttcccccggaatatggcaactcgattgcacgcatctggaaggcaaggtcatcctcgtagcggtacatgttgcttctggatatattgaggccgaggttataccggcagaaacgggccaagaaacagcgtactttctcctgaagcttgcgggacgctggcctgtgaaaacgattcataccgacaacggttctaactttaccggagcaacagtacgggccgcatgctggtgggccggtataaagcaggaatttgggattccatacaatccgcaaagtcaaggtgtcgtcgagtctatgaataaggaactcaaaaagataattggtcaggttagagatcaagccgaacatctcaagacggcggtccaaatggcagtttttattcacaactttaagaggaaaggtgggattggtggctattcagcaggggagcgaatagtggacataatagcaaccgacatacagactaaggagttgcaaaagcagatcacaaagattcaaaattttcgggtttattaccgcgatagccggaatccgctttggaaaggtcctgcgaaacttttgtggaagggcgagggagctgtcgtcattcaggataacagcgacatcaaggtcgttccgcggcgcaaggcgaaaatcatacgggactatggtaaacaaatggccggggatgactgcgttgcgtcccggcaagacgaggat

SEQ ID NO: 162 - DNA, 666 bp, Artificial Sequence
  chemically synthesized
tttttggacggtattgacaaagctcaggacgaacatgaaaagtaccactctaactggagagctatggcctccgattttaatcttccgccggtggtagcgaaagaaatcgttgccagttgcgacaaatgccaattgaagggagaagccatgcatggtcaagtggattgttcccccggaatatggcaactcgattgcacgcatctggaaggcaaggtcatcctcgtagcggtacatgttgcttctggatatattgaggccgaggttataccggcagaaacgggccaagaaacagcgtactttctcctgaagcttgcgggacgctggcctgtgaaaacgattcataccgacaacggttctaactttaccggagcaacagtacgggccgcatgctggtgggccggtataaagcaggaatttgggattccatacaatccgcaaagtcaaggtgtcgtcgagtctatgaataaggaactcaaaaagataattggtcaggttagagatcaagccgaacatctcaagacggcggtccaaatggcagtttttattcacaactttaagaggaaaggtgggattggtggctattcagcaggggagcgaatagtggacataatagcaaccgacatacagactaaggagttgcaaaagcagatcacaaagattcaaaat

SEQ ID NO: 163 - DNA, 1377 bp, Artificial Sequence
  chemically synthesized
ttcctggatggcattgataaagcgcaggatgagcacgaaaaatatcactctaactggcgcgctatggcaagcgatttcaacctcccccccgtggtggctaaagagattgtcgcgtcctgcgacaagtgccaacttaagggtgaagctatgcacggtcaagtcgactgctctccagggatatggcaattggactgcacacaccttgaaggcaaagtaatactggttgccgtacacgtggcttctggatatattgaagccgaggtgattcctgcggaaacaggacaggagacagcctactttctgctgaagctcgcggggagatggccagtcaagacaattcacacagacaatggctctaactttacgggagctacagtgcgggcagcctgctggtgggcggggatcaagcaagaatttggtatcccctacaacccgcagtcccagggtgtggttgagtctatgaataaggaactgaaaaaaatcattggacaggttcgcgatcaagcggagcacctgaagactgcggtacaaatggctgtatttatccataactttaagaggaaaggtggcattggtgggtactcagcgggtgagcggatcgtagacattatagcgacagacatacagacgaaagagcttcagaaacaaataaccaaaatccagaatggcgggggaggatctggcggtggcggctctggtggcggcgggagttttctggacggaattgataaggcacaggacgaacacgaaaagtatcactctaattggagagcgatggcaagtgattttaacttgccccctgttgtagctaaggaaatagttgcaagttgcgataagtgccagcttaaaggcgaggcaatgcacggccaggtcgactgttcacctgggatttggcagctcgactgcactcatcttgaggggaaagtaatccttgtggcagtgcacgtagcgagtggttacatcgaagcagaagtaatacctgctgagacgggacaagagactgcctatttcctgctcaaacttgctggaagatggcccgtcaagacaattcatactgataacggaagcaattttacgggtgcgacagttagagcagcttgttggtgggctgggataaaacaggagtttgggattccatataacccgcaatcacagggggtagtggagagtatgaacaaggagcttaagaaaattattggtcaagtcagagaccaagcggagcatctgaaaactgctgtgcagatggccgtctttatacacaattttaaaaggaagggagggatcggcggttacagcgccggtgagagaatagtagatatcattgccaccgatatccaaaccaaagaacttcaaaaacaaattaccaaaatacaaaat

SEQ ID NO: 164 - DNA, 864 bp, Artificial Sequence
  chemically synthesized
tttttggacggtattgacaaagctcaggacgaacatgaaaagtaccactctaactggagagctatggcctccgattttaatcttccgccggtggtagcgaaagaaatcgttgccagttgcgacaaatgccaattgaagggagaagccatgcatggtcaagtggattgttcccccggaatatggcaactcgattgcacgcatctggaaggcaaggtcatcctcgtagcggtacatgttgcttctggatatattggcgccgaggttataccggcagaaacgggccaagaaacagcgtactttctcctgaagcttgcgggacgctggcctgtgaaaacgattcataccgacaacggttctaactttaccggagcaacagtacgggccgcatgctggtgggccggtataaagcaggaatttgggattccatacaatccgcaaagtcaaggtgtcgtcgagtctatgaataaggaactcaaaaagataattggtcaggttagagatcaagccgaacatctcaagacggcggtccaaatggcagtttttattcacaactttaagaggaaaggtgggattggtggctattcagcaggggagcgaatagtggacataatagcaaccgacatacagactaaggagttgcaaaagcagatcacaaagattcaaaattttcgggtttattaccgcgatagccggaatccgctttggaaaggtcctgcgaaacttttgtggaagggcgagggagctgtcgtcattcaggataacagcgacatcaaggtcgttccgcggcgcaaggcgaaaatcatacgggactatggtaaacaaatggccggggatgactgcgttgcgtcccggcaagacgaggat

SEQ ID NO: 165 - DNA, 666 bp, Artificial Sequence
  chemically synthesized
tttttggacggtattgacaaagctcaggacgaacatgaaaagtaccactctaactggagagctatggcctccgattttaatcttccgccggtggtagcgaaagaaatcgttgccagttgcgacaaatgccaattgaagggagaagccatgcatggtcaagtggattgttcccccggaatatggcaactcgattgcacgcatctggaaggcaaggtcatcctcgtagcggtacatgttgcttctggatatattggcgccgaggttataccggcagaaacgggccaagaaacagcgtactttctcctgaagcttgcgggacgctggcctgtgaaaacgattcataccgacaacggttctaactttaccggagcaacagtacgggccgcatgctggtgggccggtataaagcaggaatttgggattccatacaatccgcaaagtcaaggtgtcgtcgagtctatgaataaggaactcaaaaagataattggtcaggttagagatcaagccgaacatctcaagacggcggtccaaatggcagtttttattcacaactttaagaggaaaggtgggattggtggctattcagcaggggagcgaatagtggacataatagcaaccgacatacagactaaggagttgcaaaagcagatcacaaagattcaaaat

SEQ ID NO: 166 - DNA, 864 bp, Artificial Sequence
  chemically synthesized
tttttggacggtattgacaaagctcaggacgaacatgaaaagtaccactctaactggagagctatggcctccgattttaatcttccgccggtggtagcgaaagaaatcgttgccagttgcgacaaatgccaattgaagggagaagccatgcatggtcaagtggattgttcccccggaatatggcaactcgattgcacgcatctggaaggcaaggtcatcctcgtagcggtacatgttgcttctggatatattttcgccgaggttataccggcagaaacgggccaagaaacagcgtactttctcctgaagcttgcgggacgctggcctgtgaaaacgattcataccgacaacggttctaactttaccggagcaacagtacgggccgcatgctggtgggccggtataaagcaggaatttgggattccatacaatccgcaaagtcaaggtgtcgtcgagtctatgaataaggaactcaaaaagataattggtcaggttagagatcaagccgaacatctcaagacggcggtccaaatggcagtttttattcacaactttaagaggaaaggtgggattggtggctattcagcaggggagcgaatagtggacataatagcaaccgacatacagactaaggagttgcaaaagcagatcacaaagattcaaaattttcgggtttattaccgcgatagccggaatccgctttggaaaggtcctgcgaaacttttgtggaagggcgagggagctgtcgtcattcaggataacagcgacatcaaggtcgttccgcggcgcaaggcgaaaatcatacgggactatggtaaacaaatggccggggatgactgcgttgcgtcccggcaagacgaggat

SEQ ID NO: 167 - DNA, 666 bp, Artificial Sequence
  chemically synthesized
tttttggacggtattgacaaagctcaggacgaacatgaaaagtaccactctaactggagagctatggcctccgattttaatcttccgccggtggtagcgaaagaaatcgttgccagttgcgacaaatgccaattgaagggagaagccatgcatggtcaagtggattgttcccccggaatatggcaactcgattgcacgcatctggaaggcaaggtcatcctcgtagcggtacatgttgcttctggatatattttcgccgaggttataccggcagaaacgggccaagaaacagcgtactttctcctgaagcttgcgggacgctggcctgtgaaaacgattcataccgacaacggttctaactttaccggagcaacagtacgggccgcatgctggtgggccggtataaagcaggaatttgggattccatacaatccgcaaagtcaaggtgtcgtcgagtctatgaataaggaactcaaaaagataattggtcaggttagagatcaagccgaacatctcaagacggcggtccaaatggcagtttttattcacaactttaagaggaaaggtgggattggtggctattcagcaggggagcgaatagtggacataatagcaaccgacatacagactaaggagttgcaaaagcagatcacaaagattcaaaat

SEQ ID NO: 168 - DNA, 864 bp, Artificial Sequence
  chemically synthesized
tttttggacggtattgacaaagctcaggacgaacatgaaaagtaccactctaactggagagctatggcctccgattttaatcttccgccggtggtagcgaaagaaatcgttgccagttgcgacaaatgccaattgaagggagaagccatgcatggtcaagtggattgttcccccggaatatggcaactcgattgcacgcatctggaaggcaaggtcatcctcgtagcggtacatgttgcttctggatatattgaggccgaggttataccggcagaaacgggccaagaaacagcgtactttctcctgaagcttgcgggacgctggcctgtgaaaacgattcataccaacaacggttctaactttaccggagcaacagtacgggccgcatgctggtgggccggtataaagcaggaatttgggattccatacaatccgcaaagtcaaggtgtcgtcgagtctatgaataaggaactcaaaaagataattggtcaggttagagatcaagccgaacatctcaagacggcggtccaaatggcagtttttattcacaactttaagaggaaaggtgggattggtggctattcagcaggggagcgaatagtggacataatagcaaccgacatacagactaaggagttgcaaaagcagatcacaaagattcaaaattttcgggtttattaccgcgatagccggaatccgctttggaaaggtcctgcgaaacttttgtggaagggcgagggagctgtcgtcattcaggataacagcgacatcaaggtcgttccgcggcgcaaggcgaaaatcatacgggactatggtaaacaaatggccggggatgactgcgttgcgtcccggcaagacgaggat

SEQ ID NO: 169 - DNA, 666 bp, Artificial Sequence
  chemically synthesized
tttttggacggtattgacaaagctcaggacgaacatgaaaagtaccactctaactggagagctatggcctccgattttaatcttccgccggtggtagcgaaagaaatcgttgccagttgcgacaaatgccaattgaagggagaagccatgcatggtcaagtggattgttcccccggaatatggcaactcgattgcacgcatctggaaggcaaggtcatcctcgtagcggtacatgttgcttctggatatattgaggccgaggttataccggcagaaacgggccaagaaacagcgtactttctcctgaagcttgcgggacgctggcctgtgaaaacgattcataccaacaacggttctaactttaccggagcaacagtacgggccgcatgctggtgggccggtataaagcaggaatttgggattccatacaatccgcaaagtcaaggtgtcgtcgagtctatgaataaggaactcaaaaagataattggtcaggttagagatcaagccgaacatctcaagacggcggtccaaatggcagtttttattcacaactttaagaggaaaggtgggattggtggctattcagcaggggagcgaatagtggacataatagcaaccgacatacagactaaggagttgcaaaagcagatcacaaagattcaaaat

SEQ ID NO: 170 - DNA, 864 bp, Artificial Sequence
  chemically synthesized
tttttggacggtattgacaaagctcaggacgaacatgaaaagtaccactctaactggagagctatggcctccgattttaatcttccgccggtggtagcgaaagaaatcgttgccagttgcgacaaatgccaattgaagggagaagccatgcatggtcaagtggattgttcccccggaatatggcaactcgattgcacgcatctggaaggcaaggtcatcctcgtagcggtacatgttgcttctggatatattgaggccgaggttataccggcagaaacgggccaagaaacagcgtactttctcctgaagcttgcgggacgctggcctgtgaaaacgattcataccgacaacggttctaactttaccggagcaacagtacgggccgcatgctggtgggccggtataaagcaggaatttgggattccatacaatccgcaaagtcaaggtgtcgtcgagtctatgaataaggaactcaaaaagataattggtcaggttagagatcaagccgaacatctcaagacggcggtccaaatggcagtttttattcacaacaagaagaggaaaggtgggattggtggctattcagcaggggagcgaatagtggacataatagcaaccgacatacagactaaggagttgcaaaagcagatcacaaagattcaaaattttcgggtttattaccgcgatagccggaatccgctttggaaaggtcctgcgaaacttttgtggaagggcgagggagctgtcgtcattcaggataacagcgacatcaaggtcgttccgcggcgcaaggcgaaaatcatacgggactatggtaaacaaatggccggggatgacagcgttgcgtcccggcaagacgaggat

SEQ ID NO: 171 - DNA, 864 bp, Artificial Sequence
  chemically synthesized
tttttggacggtattgacaaagctcaggacgaacatgaaaagtaccactctaactggagagctatggcctccgattttaatcttccgccggtggtagcgaaagaaatcgttgccagttgcgacaaatgccaattgaagggagaagccatgcatggtcaagtggattgttcccccggaatatggcaactcgattgcacgcatctggaaggcaaggtcatcctcgtagcggtacatgttgcttctggatatattgaggccgaggttataccggcagaaacgggccaagaaacagcgtactttctcctgaagcttgcgggacgctggcctgtgaaaacgattcataccgacaacggttctaactttaccggagcaacagtacgggccgcatgctggtgggccggtataaagcaggaatttgggattccatacaatccgcaaagtcaaggtgtcgtcgagtctatgaataaggaactcaaaaagataattggtcaggttagagatcaagccgaacatctcaagacggcggtccaaatggcagtttttattcacaactttaagaggaaaggtgggattggtggctattcagcaggggagcgaatagtggacataatagcaaccgacatacagactaaggagttgcaaaagcagatcacaaagattcaaaattttcgggtttattaccgcgatagccggaatccgctttggaaaggtcctgcgaaacttttgtggaagggcgagggagctgtcgtcattcaggataacagcgacatcaaggtcgttccgcggcgcaaggcgaaaatcatacgggactatggtaaacaaatggccggggatgacagcgttgcgtcccggcaagacgaggat

SEQ ID NO: 172 - DNA, 864 bp, Artificial Sequence
  chemically synthesized
tttttggacggtattgacaaagctcaggacgaacatgaaaagtaccactctaactggagagctatggcctccgattttaatcttccgccggtggtagcgaaagaaatcgttgccagttgcgacaaatgccaattgaagggagaagccatgcatggtcaagtggattgttcccccggaatatggcaactcgattgcacgcatctggaaggcaaggtcatcctcgtagcggtacatgttgcttctggatatattgaggccgaggttataccggcagaaacgggccaagaaacagcgtactttctcctgaagcttgcgggacgctggcctgtgaaaacgattcataccgacaacggttctaactttaccggagcaacagtacgggccgcatgctggtgggccggtataaagcaggaatttgggattccatacaatccgcaaagtcaaggtgtcgtcgagtctatgaataaggaactcaaaaagataattggtcaggttagagatcaagccgaacatctcaagacggcggtccaaatggcagtttttattcacaacaagaagaggaaaggtgggattggtggctattcagcaggggagcgaatagtggacataatagcaaccgacatacagactaaggagttgcaaaagcagatcacaaagattcaaaattttcgggtttattaccgcgatagccggaatccgctttggaaaggtcctgcgaaacttttgtggaagggcgagggagctgtcgtcattcaggataacagcgacatcaaggtcgttccgcggcgcaaggcgaaaatcatacgggactatggtaaacaaatggccggggatgactgcgttgcgtcccggcaagacgaggat

SEQ ID NO: 173 - DNA, 666 bp, Artificial Sequence
  chemically synthesized
tttttggacggtattgacaaagctcaggacgaacatgaaaagtaccactctaactggagagctatggcctccgattttaatcttccgccggtggtagcgaaagaaatcgttgccagttgcgacaaatgccaattgaagggagaagccatgcatggtcaagtggattgttcccccggaatatggcaactcgattgcacgcatctggaaggcaaggtcatcctcgtagcggtacatgttgcttctggatatattgaggccgaggttataccggcagaaacgggccaagaaacagcgtactttctcctgaagcttgcgggacgctggcctgtgaaaacgattcataccgacaacggttctaactttaccggagcaacagtacgggccgcatgctggtgggccggtataaagcaggaatttgggattccatacaatccgcaaagtcaaggtgtcgtcgagtctatgaataaggaactcaaaaagataattggtcaggttagagatcaagccgaacatctcaagacggcggtccaaatggcagtttttattcacaacaagaagaggaaaggtgggattggtggctattcagcaggggagcgaatagtggacataatagcaaccgacatacagactaaggagttgcaaaagcagatcacaaagattcaaaat

SEQ ID NO: 174 - DNA, 864 bp, Artificial Sequence
  chemically synthesized
tttttggacggtattgacaaagctcaggacgaacatgaaaagtaccactctaactggagagctatggcctccgattttaatcttccgccggtggtagcgaaagaaatcgttgccagttgcgacaaatgccaattgaagggagaagccatgcatggtcaagtggattgttcccccggaatatggcaactcgattgcacgcatctggaaggcaaggtcatcctcgtagcggtacatgttgcttctggatatattgaggccgaggttataccggcagaaacgggccaagaagcggcgtactttctcctgaagcttgcgggacgctggcctgtgaaaacgattcataccgacaacggttctaactttaccggagcaacagtacgggccgcatgctggtgggccggtataaagcaggaatttgggattccacggaatccgcaaagtcaaggtgtcgtcgagtctatgaataaggaactcaaaaagataattggtcaggttagagatcaagccgaacatctcaagacggcggtccaaatggcagtttttattcacaactttaagaggaaaggtgggattggtggctattcagcaggggagcgaatagtggacataatagcaaccgacatacagactaaggagttgcaaaagcagatcacaaagattcaaaattttcgggtttattaccgcgatagccggaatccgctttggaaaggtcctgcgaaacttttgtggaagggcgagggagctgtcgtcattcaggataacagcgacatcaaggtcgttccgcggcgcaaggcgaaaatcatacgggactatggtaaacaaatggccggggatgactgcgttgcgtcccggcaagacgaggat

SEQ ID NO: 175 - DNA, 666 bp, Artificial Sequence
  chemically synthesized
tttttggacggtattgacaaagctcaggacgaacatgaaaagtaccactctaactggagagctatggcctccgattttaatcttccgccggtggtagcgaaagaaatcgttgccagttgcgacaaatgccaattgaagggagaagccatgcatggtcaagtggattgttcccccggaatatggcaactcgattgcacgcatctggaaggcaaggtcatcctcgtagcggtacatgttgcttctggatatattgaggccgaggttataccggcagaaacgggccaagaagcggcgtactttctcctgaagcttgcgggacgctggcctgtgaaaacgattcataccgacaacggttctaactttaccggagcaacagtacgggccgcatgctggtgggccggtataaagcaggaatttgggattccacggaatccgcaaagtcaaggtgtcgtcgagtctatgaataaggaactcaaaaagataattggtcaggttagagatcaagccgaacatctcaagacggcggtccaaatggcagtttttattcacaactttaagaggaaaggtgggattggtggctattcagcaggggagcgaatagtggacataatagcaaccgacatacagactaaggagttgcaaaagcagatcacaaagattcaaaat

SEQ ID NO: 176 - DNA, 864 bp, Artificial Sequence
  chemically synthesized
tttttggacggtattgacaaagctcaggacgaacatgaaaagtaccactctaactggagagctatggcctccgattttaatcttccgccggtggtagcgaaagaaatcgttgccagttgcgacaaatgccaattgaagggagaagccatgcatggtcaagtggattgttcccccggaatatggcaactcgattgcacgcatctggaaggcaaggtcatcctcgtagcggtacatgttgcttctggatatattgaggccgaggttataccggcagaaacgggccaagaaacagcgtactttctcctgaagcttgcgggacgctggcctgtgaaaacgattcataccgacaacggttctaactttaccggagcaacagtacgggccgcatgctggtgggccggtataaagcaggaatttagcattccatacaatccgcaaagtcacggtgtcgtcgagtctatgaataaggaactcaaaaagataattggtcaggttagagatcaagccgaacatctcaagacggcggtccaaatggcagtttttattcacaactttaagaggaaaggtgggattggtggctattcagcaggggagcgaatagtggacataatagcaaccgacatacagactaaggagttgcaaaagcagatcacaaagattcaaaattttcgggtttattaccgcgatagccggaatccgctttggaaaggtcctgcgaaacttttgtggaagggcgagggagctgtcgtcattcaggataacagcgacatcaaggtcgttccgcggcgcaaggcgaaaatcatacgggactatggtaaacaaatggccggggatgactgcgttgcgtcccggcaagacgaggat

SEQ ID NO: 177 - DNA, 666 bp, Artificial Sequence
  chemically synthesized
tttttggacggtattgacaaagctcaggacgaacatgaaaagtaccactctaactggagagctatggcctccgattttaatcttccgccggtggtagcgaaagaaatcgttgccagttgcgacaaatgccaattgaagggagaagccatgcatggtcaagtggattgttcccccggaatatggcaactcgattgcacgcatctggaaggcaaggtcatcctcgtagcggtacatgttgcttctggatatattgaggccgaggttataccggcagaaacgggccaagaaacagcgtactttctcctgaagcttgcgggacgctggcctgtgaaaacgattcataccgacaacggttctaactttaccggagcaacagtacgggccgcatgctggtgggccggtataaagcaggaatttagcattccatacaatccgcaaagtcacggtgtcgtcgagtctatgaataaggaactcaaaaagataattggtcaggttagagatcaagccgaacatctcaagacggcggtccaaatggcagtttttattcacaactttaagaggaaaggtgggattggtggctattcagcaggggagcgaatagtggacataatagcaaccgacatacagactaaggagttgcaaaagcagatcacaaagattcaaaat

SEQ ID NO: 178 - DNA, 969 bp, Artificial Sequence
  chemically synthesized
ccacttcgcgaggctaaggatttgcatactgcccttcatataggcccacgagctttgtcaaaagcctgtaatatcagcatgcagcaggcgagggaggtggtacagacctgtcctcactgcaatagtgccccagcccttgaggcaggggtcaatcccagagggcttgggccgcttcagatttggcaaacagatttcactcttgaaccgcgaatggcaccccggagttggcttgctgtaaccgtagatactgcgagtagcgctattgtggtcacacaacacggtagagtcacatccgtcgctgtgcaacatcattgggctaccgcaatagcggtattgggccgacctaaggcgattaagaccgacaacgggtcttgtttcactagcaagtctacacgggagtggctggctagatgggggattgcgcatacgaccgggattccgggcaacagtcagggtcaggccatggtagaaagggccaatcgccttctcaaggataggattcgggtactggccgagggtgatggctttatgaaacgcatcccaacatcaaagcagggggagcttctcgctaaggcgatgtatgcacttaatcattttgagagaggcgagaacactaagacgccaatacagaagcactggagacctacagtccttaccgaaggtccgcccgtcaaaattcggatcgaaacaggtgaatgggagaaaggatggaacgttcttgtttggggtcgaggctatgccgctgtgaagaatcgcgacactgataaggtgatatgggtcccgtcacgcaaagttaagcctgacatcacccaaaaagacgaggtcaccaaaaaggacgaagccagccccttgtttgctggaatttcagattggataccctgggaggatgagcaggaggggctccaaggagagactgcgtctaacaagcaggagagaccaggggaggatactctggcggccaatgaatct

SEQ ID NO: 179 - DNA, 663 bp, Artificial Sequence
  chemically synthesized
ccacttcgcgaggctaaggatttgcatactgcccttcatataggcccacgagctttgtcaaaagcctgtaatatcagcatgcagcaggcgagggaggtggtacagacctgtcctcactgcaatagtgccccagcccttgaggcaggggtcaatcccagagggcttgggccgcttcagatttggcaaacagatttcactcttgaaccgcgaatggcaccccggagttggcttgctgtaaccgtagatactgcgagtagcgctattgtggtcacacaacacggtagagtcacatccgtcgctgtgcaacatcattgggctaccgcaatagcggtattgggccgacctaaggcgattaagaccgacaacgggtcttgtttcactagcaagtctacacgggagtggctggctagatgggggattgcgcatacgaccgggattccgggcaacagtcagggtcaggccatggtagaaagggccaatcgccttctcaaggataggattcgggtactggccgagggtgatggctttatgaaacgcatcccaacatcaaagcagggggagcttctcgctaaggcgatgtatgcacttaatcattttgagagaggcgagaacactaagacgccaatacagaagcactggagacctacagtccttaccgaaggt

SEQ ID NO: 180 - DNA, 1176 bp, Artificial Sequence
  chemically synthesized
tgcaataccaaaaaacccaatctggatgcggagttggaccagttgctgcaaggtcactatatcaaggggtatcccaagcaatatacctattttctcgaagatgggaaggtaaaagtctctcggcccgagggcgtaaagattattccaccccaatcagaccgccaaaagatagttcttcaggcacataaccttgcccatacggggcgcgaggctacgctccttaagatcgcgaatctttattggtggcccaatatgcgaaaagacgtagtcaagcagcttggacgatgtcaacagtgtcttattacgaatgctagtaataaggcatctgggcctattcttagacccgaccggcctcaaaagccgtttgataagttcttcatcgactatattggaccattgccgcccagccagggttatctttatgtgttggtggtggtagacggtatgactggattcacatggctgtatcccacaaaggcgccgagcacgtccgctactgtaaaaagtctgaatgttctcacctccatagccatacctaaggttatccattccgaccaaggcgcggcgttcaccagtagtacctttgcggagtgggcaaaggagcggggtatccatttggagttctctacaccataccacccacagtcaggctcaaaggttgaacgaaagaatagcgatattaagaggctcctcacgaagctgctcgtgggacgaccaacaaaatggtacgatttgcttccggtcgtacagttggcactgaacaatacctacagcccggttctgaaatatacgccgcatcagcttctgttcggaatcgacagtaatacaccttttgccaaccaggacacactggatcttactagagaggaggaactgagtcttctgcaggagattcgcacttcactttaccatccgtctactccccctgcttcatcaagatcatggagtcccgttgtgggccagcttgttcaggaaagagtggcccgcccagccagtcttcggcctagatggcataagcccagcacagtacttaaggtactgaaccctaggacggttgtcatactcgatcacctgggcaataaccggactgtaagcatagataatctcaaaccaacatcccaccaaaatggcacgactaatgataccgcaacaatggatcatctggagaaaaatgag

SEQ ID NO: 181 - DNA, 948 bp, Artificial Sequence
  chemically synthesized
tgcaataccaaaaaacccaatctggatgcggagttggaccagttgctgcaaggtcactatatcaaggggtatcccaagcaatatacctattttctcgaagatgggaaggtaaaagtctctcggcccgagggcgtaaagattattccaccccaatcagaccgccaaaagatagttcttcaggcacataaccttgcccatacggggcgcgaggctacgctccttaagatcgcgaatctttattggtggcccaatatgcgaaaagacgtagtcaagcagcttggacgatgtcaacagtgtcttattacgaatgctagtaataaggcatctgggcctattcttagacccgaccggcctcaaaagccgtttgataagttcttcatcgactatattggaccattgccgcccagccagggttatctttatgtgttggtggtggtagacggtatgactggattcacatggctgtatcccacaaaggcgccgagcacgtccgctactgtaaaaagtctgaatgttctcacctccatagccatacctaaggttatccattccgaccaaggcgcggcgttcaccagtagtacctttgcggagtgggcaaaggagcggggtatccatttggagttctctacaccataccacccacagtcaggctcaaaggttgaacgaaagaatagcgatattaagaggctcctcacgaagctgctcgtgggacgaccaacaaaatggtacgatttgcttccggtcgtacagttggcactgaacaatacctacagcccggttctgaaatatacgccgcatcagcttctgttcggaatcgacagtaatacaccttttgccaaccaggacacactggatcttactagagaggaggaactgagtcttctgcaggagattcgcacttcactttaccatccgtctactccccctgcttcatcaagatcatggagt

SEQ ID NO: 182 - DNA, 831 bp, Artificial Sequence
  chemically synthesized
gggtctaccggagtgttctgggtagaaaacatccaggaagctcaagatgagcacgagaactggcacacctcccctaagatacttgccaggaactacaagatacctctcacggtggcgaaacagatcacccaggagtgcccacactgcaccaagcaaggttccggacctgctggttgtgtaatgaggtcaccaaaccattggcaggccgattgtacgcacctggataataagatcatcctgactttcgttgagagtaattctggatacatacacgcgaccctgctgagcaaggaaaacgccttgtgcacatctctggcaatcttggagtgggctagattgtttagcccaaaatctcttcacacagacaatggcacaaattttgtggccgaaccagttgtgaacttgctgaaattccttaagatcgcgcatacgactggtatcccttatcatcctgaatcacaagggatcgttgagagagctaacagaacactcaaagaaaagattcagagccatcgcgataacacccaaacacttgaagcagcactccagttggcacttataacttgtaacaaggggcgagaatccatgggggggcagactccgtgggaagtatttattaccaaccaggcccaagtaattcatgaaaaacttttgttgcagcaggctcagagttcaaagaaattctgcttttataaaataccgggggagcacgactggaaggggccaacacgggtattgtggaagggcgatggagcggtagtggttaatgatgagggaaaagggatcatcgctgtgccgcttactagaacaaagctccttattaagcctaac

SEQ ID NO: 183 - DNA, 675 bp, Artificial Sequence
  chemically synthesized
gggtctaccggagtgttctgggtagaaaacatccaggaagctcaagatgagcacgagaactggcacacctcccctaagatacttgccaggaactacaagatacctctcacggtggcgaaacagatcacccaggagtgcccacactgcaccaagcaaggttccggacctgctggttgtgtaatgaggtcaccaaaccattggcaggccgattgtacgcacctggataataagatcatcctgactttcgttgagagtaattctggatacatacacgcgaccctgctgagcaaggaaaacgccttgtgcacatctctggcaatcttggagtgggctagattgtttagcccaaaatctcttcacacagacaatggcacaaattttgtggccgaaccagttgtgaacttgctgaaattccttaagatcgcgcatacgactggtatcccttatcatcctgaatcacaagggatcgttgagagagctaacagaacactcaaagaaaagattcagagccatcgcgataacacccaaacacttgaagcagcactccagttggcacttataacttgtaacaaggggcgagaatccatgggggggcagactccgtgggaagtatttattaccaaccaggcccaagtaattcatgaaaaacttttgttgcagcaggctcagagttca

SEQ ID NO: 184 - DNA, 1224 bp, Artificial Sequence
  chemically synthesized
atcgagaatagcagcccttatactagtgaacacttccattatacagtcacggatatcaaagaccttacgaagctgggggctatttatgataagaccaaaaagtattgggtatatcaaggcaagcccgttatgcccgatcagtttacttttgagcttctggatttcctccaccaacttactcatttgagtttctcaaagatgaaagcgctcctcgagagaagccacagcccctactatatgctcaatcgagaccgcacacttaagaacatcacggagacttgcaaggcatgcgctcaagtgaacgcttcaaagagcgcagtaaagcagggtacacgagtaaggggccatcggccaggaacacactgggaaatagatttcactgaaataaaaccgggtctctatgggtataagtatctgcttgtttttatagacacgttttccggatggatcgaggcatttccaacgaaaaaagaaactgccaaggtagtcacaaaaaaactcctggaagagatatttccacggtttggaatgccccaagttcttggcaccgacaatggaccggcgtttgtaagtaaggtgagccaaactgtcgcagacctcttgggaatagattggaagctgcactgtgcataccgcccccaatccagtgggcaagtcgaacgcatgaaccgcacaataaaagaaacgctgacgaaacttactctggcaacagggagccgcgactgggtgctgcttctccccctggcgctttaccgcgcccgcaatacccccggtccccatgggctcactccgtatgagatactctatggggcacccccgccgctcgtgaatttcccggacccggacatgacgcgagtgactaacagcccgtctttgcaggctcaccttcaagccctctatctcgttcagcacgaggtatggaggcctctcgcagccgcgtaccaagagcaattggatcgcccagtagtcccgcacccctatagggttggggacacagtatgggttaggagacatcaaaccaagaacttggaacctaggtggaaggggccctacaccgtcttgcttactacccctacggctctgaaagtagatggcatcgctgcttggatacatgccgcccatgttaaggccgcggatccgggaggaggtccatctagcagactgacttggagagtacaaaggagtcaaaacccgttgaagatcagactgacgagagaggcccca

SEQ ID NO: 185 - DNA, 978 bp, Artificial Sequence
  chemically synthesized
atcgagaatagcagcccttatactagtgaacacttccattatacagtcacggatatcaaagaccttacgaagctgggggctatttatgataagaccaaaaagtattgggtatatcaaggcaagcccgttatgcccgatcagtttacttttgagcttctggatttcctccaccaacttactcatttgagtttctcaaagatgaaagcgctcctcgagagaagccacagcccctactatatgctcaatcgagaccgcacacttaagaacatcacggagacttgcaaggcatgcgctcaagtgaacgcttcaaagagcgcagtaaagcagggtacacgagtaaggggccatcggccaggaacacactgggaaatagatttcactgaaataaaaccgggtctctatgggtataagtatctgcttgtttttatagacacgttttccggatggatcgaggcatttccaacgaaaaaagaaactgccaaggtagtcacaaaaaaactcctggaagagatatttccacggtttggaatgccccaagttcttggcaccgacaatggaccggcgtttgtaagtaaggtgagccaaactgtcgcagacctcttgggaatagattggaagctgcactgtgcataccgcccccaatccagtgggcaagtcgaacgcatgaaccgcacaataaaagaaacgctgacgaaacttactctggcaacagggagccgcgactgggtgctgcttctccccctggcgctttaccgcgcccgcaatacccccggtccccatgggctcactccgtatgagatactctatggggcacccccgccgctcgtgaatttcccggacccggacatgacgcgagtgactaacagcccgtctttgcaggctcaccttcaagccctctatctcgttcagcacgaggtatggaggcctctcgcagccgcgtaccaagagcaattggatcgcccagtagtcccgcacccc

SEQ ID NO: 186 - DNA, 954 bp, Artificial Sequence
  chemically synthesized
ttggagagtgctcaggaatctcacgcacttcaccatcagaatgctgccgcgttgagattccaattccatataactcgcgaacaagcgagagaaatcgtgaagttgtgccctaactgcccggactgggggcacgccccgcagctcggcgtaaaccccagagggcttaaaccaagggttctttggcagatggatgtgacccatgtgtccgagtttgggaagctgaaatatgtccacgttactgtggatacttactcacattttacattcgccactgctcgcacaggagaagctaccaaggatgtgctccaacacctggcacaaagctttgcgtacatgggaataccacagaaaattaaaactgacaacgcacctgcttatgtgagccgatccattcaggagtttttggcacgctggaagatcagtcatgtaacaggcattccgtataatccccagggtcaggcaattgtagaacgcactcaccaaaacatcaaggctcaactgaataagcttcagaaggctgggaaatactacacacctcatcatctcttggcacacgcactgtttgtcttgaaccacgtaaatatggacaatcagggtcacacagccgctgaacgacattgggggccgatctccgctgacccgaaacctatggttatgtggaaagatctgttgacgggaagctggaagggcccagacgttcttattactgcgggtcgcggctacgcttgtgtgttcccgcaagacgcggaaactcccatctgggttccagatcgctttattcgaccgttcactgagaggaaagaggccacacctaccccgggtactgccgagaagacacccccaagagatgagaaagatcaacaggagagcccaaagaatgagtctagcccccaccaaagagaggacggtttggcaacatccgccggagtcgatcttcggtcagggggtggcccg

SEQ ID NO: 187 - DNA, 636 bp, Artificial Sequence
  chemically synthesized
ttggagagtgctcaggaatctcacgcacttcaccatcagaatgctgccgcgttgagattccaattccatataactcgcgaacaagcgagagaaatcgtgaagttgtgccctaactgcccggactgggggcacgccccgcagctcggcgtaaaccccagagggcttaaaccaagggttctttggcagatggatgtgacccatgtgtccgagtttgggaagctgaaatatgtccacgttactgtggatacttactcacattttacattcgccactgctcgcacaggagaagctaccaaggatgtgctccaacacctggcacaaagctttgcgtacatgggaataccacagaaaattaaaactgacaacgcacctgcttatgtgagccgatccattcaggagtttttggcacgctggaagatcagtcatgtaacaggcattccgtataatccccagggtcaggcaattgtagaacgcactcaccaaaacatcaaggctcaactgaataagcttcagaaggctgggaaatactacacacctcatcatctcttggcacacgcactgtttgtcttgaaccacgtaaatatggacaatcagggtcacacagccgctgaacgacattgggggccgatctccgct

SEQ ID NO: 188 - DNA, 1140 bp, Artificial Sequence
  chemically synthesized
gtcttgaaaaagggcgatgcgctggcgagcacggatcttgtaatggaatattctgaaactgacgaaaagtttacagcaggagctgaactgcacgatggagtgtttatgcggggcgatcttattgtccctccactcgaaatgctccacgccatactcttggcaatacacggggtgagtcatacacataagggtgggataatgtcatacttttctaagttttggacccaccctaaagctagtcagacgatcgatctcatcctcggtcactgccaaatctgccttaaacataacccaaagtataagtccaggctccaaggacaccgccctttgcccagtcgacccttcgcacacttgcaaattgattttgtccaaatgtgcgtaaaaaagcctatgtatgcacttgttatcattgatgtatttagtaaatggccagagataattccttgtaataaagaagacgcaaaaactgtatgcgatattctcatgaaggacataatccctagatggggcctgcctgatcaaattgacagcgatcaaggcacgcatttcacagcaaagataagccaagaactgacccactccattggagtggcatggaaactccactgtccaggtcacccccggagttcagggatcgttgagcgcacgaaccgaacattgaaatctaagattatcaaggcccaggagcagcttcaactgagtaaatggactgaggttttgccctacgtgctgctcgaaatgagagcaactcccaagaagcacggacttagccctcatgaaatcgtaatggggcgacccatgaaaacaacctacctttccgatatgtcccctctgtgggccactgacactttggtgacttacatgaacaagttgacacgacaactctctgcctaccaccagcaagttgtagaccagtggccctccactagcttgccgcccggacctgaacccggatcttggtgtatgctcagaaatccgaaaaagtccagcaactgggaaggtccctttctcatcctcttgtctacgcctacagcagttaaggttgagggaaggccaacgtggattcatctcgatcattgtaaattgctgcgcagttcactgtccagctctttgggtggcccggtaaatcaactgttgagc

SEQ ID NO: 189 - DNA, 933 bp, Artificial Sequence
  chemically synthesized
gtcttgaaaaagggcgatgcgctggcgagcacggatcttgtaatggaatattctgaaactgacgaaaagtttacagcaggagctgaactgcacgatggagtgtttatgcggggcgatcttattgtccctccactcgaaatgctccacgccatactcttggcaatacacggggtgagtcatacacataagggtgggataatgtcatacttttctaagttttggacccaccctaaagctagtcagacgatcgatctcatcctcggtcactgccaaatctgccttaaacataacccaaagtataagtccaggctccaaggacaccgccctttgcccagtcgacccttcgcacacttgcaaattgattttgtccaaatgtgcgtaaaaaagcctatgtatgcacttgttatcattgatgtatttagtaaatggccagagataattccttgtaataaagaagacgcaaaaactgtatgcgatattctcatgaaggacataatccctagatggggcctgcctgatcaaattgacagcgatcaaggcacgcatttcacagcaaagataagccaagaactgacccactccattggagtggcatggaaactccactgtccaggtcacccccggagttcagggatcgttgagcgcacgaaccgaacattgaaatctaagattatcaaggcccaggagcagcttcaactgagtaaatggactgaggttttgccctacgtgctgctcgaaatgagagcaactcccaagaagcacggacttagccctcatgaaatcgtaatggggcgacccatgaaaacaacctacctttccgatatgtcccctctgtgggccactgacactttggtgacttacatgaacaagttgacacgacaactctctgcctaccaccagcaagttgtagaccagtggccctccactagcttg

SEQ ID NO: 190 - DNA, 888 bp, Artificial Sequence
  chemically synthesized
ttgccactggaaacacctgagcaatggcacaagctgacccattgtaacagccgagcacttagtcgatggccgaatccgaggatttccgcttgggacccacgatctccggccaccctgtgcgaaacgtgtcagaaactcaatccaacagggggcgggaaaatgagaacgatccagcgagggtgggctcctaaccacatctggcaggctgacatcacgcattacaagtataaacagtttacatacgcactgcatgtgttcgtcgatacgtattcaggtgctacacacgcttctgctaagcgcggtctcacaacacagatgacgattgaaggccttcttgaggctattgtccacttgggaaggccgaaaaagttgaacaccgatcaaggtgcaaactatacgagcaagactttcgttcggttttgccaacagtttggggtatctcttagtcatcacgtaccctataatcccaccagttccggcttggtggaacgaacgaacggtctgctgaaactgttgctgtccaaatatcacttggatgagccacatttgccgatgactcaggccctctcccgcgctctctggacacacaaccagataaaccttctcccgatacttaagactcgctgggaacttcaccattcacctccattggcagttattagtgaaggtggtgagactcctaaaggtagtgacaaacttttcttgtacaagttgcccggccaaaataaccggaggtggctcgggccgttgccagcgcttgtcgaagcgtctggcggggccctgcttgcgaccgacccccctgtctgggtgccatggcggctcttgaaggcgttcaagtgcctgaaaaatgacggaccagaagacgcgcataatagaagctcagatggt

SEQ ID NO: 191 - DNA, 681 bp, Artificial Sequence
  chemically synthesized
ttgccactggaaacacctgagcaatggcacaagctgacccattgtaacagccgagcacttagtcgatggccgaatccgaggatttccgcttgggacccacgatctccggccaccctgtgcgaaacgtgtcagaaactcaatccaacagggggcgggaaaatgagaacgatccagcgagggtgggctcctaaccacatctggcaggctgacatcacgcattacaagtataaacagtttacatacgcactgcatgtgttcgtcgatacgtattcaggtgctacacacgcttctgctaagcgcggtctcacaacacagatgacgattgaaggccttcttgaggctattgtccacttgggaaggccgaaaaagttgaacaccgatcaaggtgcaaactatacgagcaagactttcgttcggttttgccaacagtttggggtatctcttagtcatcacgtaccctataatcccaccagttccggcttggtggaacgaacgaacggtctgctgaaactgttgctgtccaaatatcacttggatgagccacatttgccgatgactcaggccctctcccgcgctctctggacacacaaccagataaaccttctcccgatacttaagactcgctgggaacttcaccattcacctccattggcagttattagtgaaggtggtgagactcct

SEQ ID NO: 192 - DNA, 879 bp, Artificial Sequence
  chemically synthesized
ttcctggagaaaattgagcctgcgcaagaagagcacgacaaatatcacagtaatgtaaaggagttggttttcaaatttggacttccacggattgtagctcgccagatagttgatacctgtgataaatgtcaccaaaagggtgaagctattcacggtcaggcgaactctgacttgggcacgtggcagatggactgcactcacttggaaggtaaaatcattatcgttgcggttcatgtagccagtggattcatcgaagcagaagtcattcctcaggaaacaggaagacagacagcactgttcctcctcaagctcgcaggtaggtggcccatcacgcatcttcataccgataatggcgcaaactttgcaagccaggaggtgaaaatggtagcttggtgggctggtatagaacacacgtttggtgtcccgtacaaccctcaaagtcaaggcgttgtggaggccatgaaccatcacttgaagaaccaaatcgaccgcataagagagcaggccaactccgtagaaacgatcgtactcatggcggtacactgcatgaacttcaagcgacgaggaggcatcggggatatgacgcccgcggagcggctcatcaatatgataacaaccgaacaggagattcagttccaacagtccaaaaactcaaaatttaagaattttagagtgtattaccgggaaggtagagaccagttgtggaagggtcctggtgaattgttgtggaagggtgaaggtgcggtaatcctgaaggtaggtaccgacatcaaggtcgttcccagaaggaaggctaagatcatcaaggattatgggggtgggaaagaagtggattcctctagtcacatggaagataccggcgaggctagggaggttgcg

SEQ ID NO: 193 - DNA, 666 bp, Artificial Sequence
  chemically synthesized
ttcctggagaaaattgagcctgcgcaagaagagcacgacaaatatcacagtaatgtaaaggagttggttttcaaatttggacttccacggattgtagctcgccagatagttgatacctgtgataaatgtcaccaaaagggtgaagctattcacggtcaggcgaactctgacttgggcacgtggcagatggactgcactcacttggaaggtaaaatcattatcgttgcggttcatgtagccagtggattcatcgaagcagaagtcattcctcaggaaacaggaagacagacagcactgttcctcctcaagctcgcaggtaggtggcccatcacgcatcttcataccgataatggcgcaaactttgcaagccaggaggtgaaaatggtagcttggtgggctggtatagaacacacgtttggtgtcccgtacaaccctcaaagtcaaggcgttgtggaggccatgaaccatcacttgaagaaccaaatcgaccgcataagagagcaggccaactccgtagaaacgatcgtactcatggcggtacactgcatgaacttcaagcgacgaggaggcatcggggatatgacgcccgcggagcggctcatcaatatgataacaaccgaacaggagattcagttccaacagtccaaaaactcaaaatttaagaat

SEQ ID NO: 194 - DNA, 843 bp, Artificial Sequence
  chemically synthesized
agttcttgggtagaccgaatagaggaggctgagattaaccacgaaaaattccacagcgaccctcagtatcttcgaaccgaatttaatttgcccaagatggtcgctgaagaaatccgacgaaagtgccctgtatgccgcatccggggcgaacaggtgggcggccagttgaagataggtcctggtatctggcagatggactgcacgcacttcgatggcaagatcatcctggtagggatacacgtagagtcaggttatatctgggcgcagattattagtcaggaaacggctgactgcactgtaaaggctgtccttcaacttttgagcgcccacaatgtcaccgaactccaaacagacaatggacctaattttaagaatcagaaaatggagggggtattgaactatatgggggtaaaacataaattcggtattccagggaacccgcaatctcaggcgctggtggagaacgttaatcatacccttaaggtgtggattcggaagttcctgccagaaactactagcctggataacgccctgtcattggctgttcactcacttaattttaaacggaggggcagaataggcggaatggccccctacgaattgttggctcaacaagagagtcttaggatacaagattacttctcagcaataccccaaaaattgcaagcacagtggatttattacaaagatcagaaagataagaaatggaagggaccgatgcgagttgagtattgggggcaagggtctgttctccttaaggatgaagagaagggttacttcttgataccccggcggcatatacgacgggtgcccgaaccttgcgcactgcccgagggtgatgaa

SEQ ID NO: 195 - DNA, 669 bp, Artificial Sequence
  chemically synthesized
agttcttgggtagaccgaatagaggaggctgagattaaccacgaaaaattccacagcgaccctcagtatcttcgaaccgaatttaatttgcccaagatggtcgctgaagaaatccgacgaaagtgccctgtatgccgcatccggggcgaacaggtgggcggccagttgaagataggtcctggtatctggcagatggactgcacgcacttcgatggcaagatcatcctggtagggatacacgtagagtcaggttatatctgggcgcagattattagtcaggaaacggctgactgcactgtaaaggctgtccttcaacttttgagcgcccacaatgtcaccgaactccaaacagacaatggacctaattttaagaatcagaaaatggagggggtattgaactatatgggggtaaaacataaattcggtattccagggaacccgcaatctcaggcgctggtggagaacgttaatcatacccttaaggtgtggattcggaagttcctgccagaaactactagcctggataacgccctgtcattggctgttcactcacttaattttaaacggaggggcagaataggcggaatggccccctacgaattgttggctcaacaagagagtcttaggatacaagattacttctcagcaataccccaaaaattgcaagca

SEQ ID NO: 196 - DNA, 843 bp, Artificial Sequence
  chemically synthesized
acctgctttctcgaaaacattccatctgccactgaggatcacgaaaggtggcatacttcccccgacatcttggtccgacaatttcacctccctaaaagaatagcaaaagagatcgtagcacggtgccaggaatgtaaacgcaccacaacttctccggtccggggtacgaaccccagagggcgcttcttgtggcaaatggataatactcactggaataagacgataatatgggttgcagtcgagacaaattccggtctcgtggaagcgcaagttatcccggaggagaccgcactgcaagtagccttgtgtatccttcaacttattcaacgatacacggtcttgcatctccattctgacaatgggccctgttttactgcacatagaatagaaaacttgtgtaaatacctcggtattactaagactacgggtatcccatataatcctcagtcacagggcgtagtggagcgagcgcatcgggaccttaaagacagattggcagcctatcagggagactgcgaaacagtagaagccgcgctgagtcttgcattggtgtccctgaataaaaagcgggggggcataggaggccatacaccgtatgagatttacctggagtccgagcacacaaagtaccaagatcagttggagcagcagttctcaaagcaaaagatcgaaaaatggtgctacgtgaggaacaggaggaaggagtggaagggaccgtacaaggtcttgtgggatggggatggagccgcggtcatcgaggaggagggaaaaacagcactttatccacaccgacacatgcggttcatcccaccgcccgactccgacattcaagacgggagttca

SEQ ID NO: 197 - DNA, 672 bp, Artificial Sequence
  chemically synthesized
acctgctttctcgaaaacattccatctgccactgaggatcacgaaaggtggcatacttcccccgacatcttggtccgacaatttcacctccctaaaagaatagcaaaagagatcgtagcacggtgccaggaatgtaaacgcaccacaacttctccggtccggggtacgaaccccagagggcgcttcttgtggcaaatggataatactcactggaataagacgataatatgggttgcagtcgagacaaattccggtctcgtggaagcgcaagttatcccggaggagaccgcactgcaagtagccttgtgtatccttcaacttattcaacgatacacggtcttgcatctccattctgacaatgggccctgttttactgcacatagaatagaaaacttgtgtaaatacctcggtattactaagactacgggtatcccatataatcctcagtcacagggcgtagtggagcgagcgcatcgggaccttaaagacagattggcagcctatcagggagactgcgaaacagtagaagccgcgctgagtcttgcattggtgtccctgaataaaaagcgggggggcataggaggccatacaccgtatgagatttacctggagtccgagcacacaaagtaccaagatcagttggagcagcagttctcaaagcaaaagatcgaa

SEQ ID NO: 198 - DNA, 801 bp, Artificial Sequence
  chemically synthesized
aatgtgcatacgtcagagtcaaccagaaagtacccctacccgttcattcataggatgttggcccatgcaaacgcgcagactatcaggtattctctcaagaataatacgatcacgtatttcaatgagagtgatgtggactggtcctccgcgattgactatcaatgcccggactgcctgattgggaagagtaccaaacatcgccatatcaagggaagtaggctcaaatatcagaacagctatgaaccttttcagtatctgcatacagacatattcgggccagtgcacaacctgccaaaaagcgctcctagctatttcattagtttcaccgacgaaacaacaaagtttaggtgggtttatccactgcacgacaggagggaagacagcatactcgatgtcttcacgacaattctggcgtttatcaagaatcagttccaagcgagcgtgttggtgatacagatggatagaggcagcgaatatactaaccgaactcttcacaaattcttggagaagaacgggataactccttgttacacaacaacagcagattcacgcgcacacggcgtcgcggagcggctcaacaggactctcctggacgattgccgcactcaactccagtgttcagggctcccaaaccatctctggttttctgccatagagttttctactatagtgcgcaattccctcgcgagcccaaaatctaagaaaagcgcgaggcaacatgcaggactggctggccttgacatctccacactgctgccttttggtcagccggtaattgtcaatgaccataaccccaacagc

SEQ ID NO: 199 - DNA, 861 bp, Artificial Sequence
  chemically synthesized
aaatacgtctttattgaaaagcaccaggccgaattttccatcaaagctatgtgtagagtcttgagagttgcaagaagcggctggtacacctggtgtcagaggagaactcgcatatccacgcggcagcagtttcgacaacactgcgattccgtggtgttggccgcatttacgcgatcaaaacaaagatacggcgcacctcgccttaccgacgaactcagggcccaaggatacccatttaatgtgaaaacagttgcggccagtctgcgcaggcaagggctgcgcgctaaggcgagtagaaaatttagccccgtctcttatcgcgcacacggccttcccgtcagcgagaatcttcttgagcaagatttttacgcgtcaggccctaatcaaaagtgggccggggacataacgtatcttagaacagacgagggttggctctatctcgccgtcgtcattgacttgtggagtagggcggtcatagggtggagcatgtcaccacgcatgacagcccaactcgcgtgtgatgccctccaaatggctctgtggaggaggaagcgcccacgcaatgtgattgtgcacaccgatagaggcgggcagtattgtagcgccgattatcaggcgcagttgaagcgccataaccttcgaggtagcatgtccgcgaagggttgttgctatgacaatgcgtgcgtagaatcattctttcatagtttgaaggttgagtgcatccacggggagcattttatctcccgcgaaattatgagggcgacggtctttaactacatcgaatgcgattataatcggtggaggcgacactcttggtgtggtggtcttagcccggagcaatttgaaaacaaaaacctcgcc

SEQ ID NO: 200 - DNA, 525 bp, Artificial Sequence
  chemically synthesized
gtcagcgagaatcttcttgagcaagatttttacgcgtcaggccctaatcaaaagtgggccggggacataacgtatcttagaacagacgagggttggctctatctcgccgtcgtcattgacttgtggagtagggcggtcatagggtggagcatgtcaccacgcatgacagcccaactcgcgtgtgatgccctccaaatggctctgtggaggaggaagcgcccacgcaatgtgattgtgcacaccgatagaggcgggcagtattgtagcgccgattatcaggcgcagttgaagcgccataaccttcgaggtagcatgtccgcgaagggttgttgctatgacaatgcgtgcgtagaatcattctttcatagtttgaaggttgagtgcatccacggggagcattttatctcccgcgaaattatgagggcgacggtctttaactacatcgaatgcgattataatcggtggaggcgacactcttggtgtggtggtcttagcccggagcaatttgaaaacaaaaacctcgcc

SEQ ID NO: 201 - DNA, 27 bp, Artificial Sequence
  chemically synthesized
cccaagaagaagaggaaagtctcgagc

SEQ ID NO: 202 - DNA, 72 bp, Artificial Sequence
  chemically synthesized
gaccctaagaaaaaacgaaaggtagaccctaaaaagaaacggaaagtcgatccgaaaaagaagcggaaggtt

SEQ ID NO: 203 - DNA, 66 bp, Artificial Sequence
  chemically synthesized
gactacaaagaccatgacggtgattataaagatcatgacatcgattacaaggatgacgatgacaag

SEQ ID NO: 204 - DNA, 48 bp, Artificial Sequence
  chemically synthesized
aaaaggccggcggccacgaaaaaggccggccaggcaaagaagaagaaa

SEQ ID NO: 205 - DNA, 117 bp, Artificial Sequence
  chemically synthesized
aactcaaagaaaaggtcactggaggacaacgaaacggaaatcaaagtctccagagacacctggaacactaagaacatgcggtccctggaaccgccacgaagcaagaaacggatacat

SEQ ID NO: 206 - DNA, 96 bp, Artificial Sequence
  chemically synthesized
cccaagaagaagaggaaagtctcgagcgactacaaagaccatgacggtgattataaagatcatgacatcgattacaaggatgacgatgacaagtga

SEQ ID NO: 207 - DNA, 150 bp, Artificial Sequence
  chemically synthesized
gaccctaagaaaaaacgaaaggtagaccctaaaaagaaacggaaagtcgatccgaaaaagaagcggaaggttctcgaggactacaaagaccatgacggtgattataaagatcatgacatcgattacaaggatgacgatgacaagtaatga

SEQ ID NO: 208 - DNA, 126 bp, Artificial Sequence
  chemically synthesized
aaaaggccggcggccacgaaaaaggccggccaggcaaagaagaagaaactcgaggactacaaagaccatgacggtgattataaagatcatgacatcgattacaaggatgacgatgacaagtaatga

SEQ ID NO: 209 - DNA, 195 bp, Artificial Sequence
  chemically synthesized
aactcaaagaaaaggtcactggaggacaacgaaacggaaatcaaagtctccagagacacctggaacactaagaacatgcggtccctggaaccgccacgaagcaagaaacggatacatctcgaggactacaaagaccatgacggtgattataaagatcatgacatcgattacaaggatgacgatgacaagtaatga

SEQ ID NO: 210 - DNA, 201 bp, Artificial Sequence
  chemically synthesized
aaaaggccggcggccacgaaaaaggccggccaggcaaagaagaagaaagttgaccctaagaaaaaacgaaaggtagaccctaaaaagaaacggaaagtcgatccgaaaaagaagcggaaggttctcgaggactacaaagaccatgacggtgattataaagatcatgacatcgattacaaggatgacgatgacaagtaatga

SEQ ID NO: 211 - DNA, 5157 bp, Artificial Sequence
  chemically synthesized
atgcccaaaaagaagaggaaagtcagctcttttttggacggtattgacaaagctcaggacgaacatgaaaagtaccactctaactggagagctatggcctccgattttaatcttccgccggtggtagcgaaagaaatcgttgccagttgcgacaaatgccaattgaagggagaagccatgcatggtcaagtggattgttcccccggaatatggcaactcgattgcacgcatctggaaggcaaggtcatcctcgtagcggtacatgttgcttctggatatattgaggccgaggttataccggcagaaacgggccaagaaacagcgtactttctcctgaagcttgcgggacgctggcctgtgaaaacgattcataccgacaacggttctaactttaccggagcaacagtacgggccgcatgctggtgggccggtataaagcaggaatttgggattccatacaatccgcaaagtcaaggtgtcgtcgagtctatgaataaggaactcaaaaagataattggtcaggttagagatcaagccgaacatctcaagacggcggtccaaatggcagtttttattcacaactttaagaggaaaggtgggattggtggctattcagcaggggagcgaatagtggacataatagcaaccgacatacagactaaggagttgcaaaagcagatcacaaagattcaaaattttcgggtttattaccgcgatagccggaatccgctttggaaaggtcctgcgaaacttttgtggaagggcgagggagctgtcgtcattcaggataacagcgacatcaaggtcgttccgcggcgcaaggcgaaaatcatacgggactatggtaaacaaatggccggggatgactgcgttgcgtcccggcaagacgaggatgggggcgggggaagcggcggtggaggtagtggagggggaggatcagataaaaagtattctattggtttagccatcggcactaattccgttggatgggctgtcataaccgatgaatacaaagtaccttcaaagaaatttaaggtgttggggaacacagaccgtcattcgattaaaaagaatcttatcggtgccctcctattcgatagtggcgaaacggcagaggcgactcgcctgaaacgaaccgctcggagaaggtatacacgtcgcaagaaccgaatatgttacttacaagaaatttttagcaatgagatggccaaagttgacgattctttctttcaccgtttggaagagtccttccttgtcgaagaggacaagaaacatgaacggcaccccatctttggaaacatagtagatgaggtggcatatcatgaaaagtacccaacgatttatcacctcagaaaaaagctagttgactcaactgataaagcggacctgaggttaatctacttggctcttgcccatatgataaagttccgtgggcactttctcattgagggtgatctaaatccggacaactcggatgtcgacaaactgttcatccagttagtacaaacctataatcagttgtttgaagagaaccctataaatgcaagtggcgtggatgcgaaggctattcttagcgcccgcctctctaaatcccgacggctagaaaacctgatcgcacaattacccggagagaagaaaaatgggttgttcggtaaccttatagcgctctcactaggcctgacaccaaattttaagtcgaacttcgacttagctgaagatgccaaattgcagcttagtaaggacacgtacgatgacgatctcgacaatctactggcacaaattggagatcagtatgcggacttatttttggctgccaaaaaccttagcgatgcaatcctcctatctgacatactgagagttaatactgagattaccaaggcgccgttatccgcttcaatgatcaaaaggtacgatgaacatcaccaagacttgacacttctcaaggccctagtccgtcagcaactgcctgagaaatataaggaaatattctttgatcagtcgaaaaacgggtacgcaggttatattgacggcggagcgagtcaagaggaattctacaagtttatcaaacccatattagagaagatggatgggacggaagagttgcttgtaaaactcaatcgcgaagatctactgcgaaagcagcggactttcgacaacggtagcattccacatcaaatccacttaggcgaattgcatgctatacttagaaggcaggaggatttttatccgttcctcaaagacaatcgtgaaaagattgagaaaatcctaacctttcgcataccttactatgtgggacccctggcccgagggaactctcggttcgcatggatgacaagaaagtccgaagaaacgattactccatggaattttgaggaagttgtcgataaaggtgcgtcagctcaatcgttcatcgagaggatgaccaactttgacaagaatttaccgaacgaaaaagtattgcctaagcacagtttactttacgagtatttcacagtgtacaatgaactcacgaaagttaagtatgtcactgagggcatgcgtaaacccgcctttctaagcggagaacagaagaaagcaatagtagatctgttattcaagaccaaccgcaaagtgacagttaagcaattgaaagaggactactttaagaaaattgaatgcttcgattctgtcgagatctccggggtagaagatcgatttaatgcgtcacttggtacgtatcatgacctcctaaagataattaaagataaggacttcctggataacgaagagaatgaagatatcttagaagatatagtgttgactcttaccctctttgaagatcgggaaatgattgaggaaagactaaaaacatacgctcacctgttcgacgataaggttatgaaacagttaaagaggcgtcgctatacgggctggggacgattgtcgcggaaacttatcaacgggataagagacaagcaaagtggtaaaactattctcgattttctaaagagcgacggcttcgccaataggaactttatgcagctgatccatgatgactctttaaccttcaaagaggatatacaaaaggcacaggtttccggacaaggggactcattgcacgaacatattgcgaatcttgctggttcgccagccatcaaaaagggcatactccagacagtcaaagtagtggatgagctagttaaggtcatgggacgtcacaaaccggaaaacattgtaatcgagatggcacgcgaaaatcaaacgactcagaaggggcaaaaaaacagtcgagagcggatgaagagaatagaagagggtattaaagaactgggcagccagatcttaaaggagcatcctgtggaaaatacccaattgcagaacgagaaactttacctctattacctacaaaatggaagggacatgtatgttgatcaggaactggacataaaccgtttatctgattacgacgtcgatgccattgtaccccaatcctttttgaaggacgattcaatcgacaataaagtgcttacacgctcggataagaaccgagggaaaagtgacaatgttccaagcgaggaagtcgtaaagaaaatgaagaactattggcggcagctcctaaatgcgaaactgataacgcaaagaaagttcgataacttaactaaagctgagaggggtggcttgtctgaacttgacaaggccggatttattaaacgtcagctcgtggaaacccgccaaatcacaaagcatgttgcacagatactagattcccgaatgaatacgaaatacgacgagaacgataagctgattcgggaagtcaaagtaatcactttaaagtcaaaattggtgtcggacttcagaaaggattttcaattctataaagttagggagataaataactaccaccatgcgcacgacgcttatcttaatgccgtcgtagggaccgcactcattaagaaatacccgaagctagaaagtgagtttgtgtatggtgattacaaagtttatgacgtccgtaagatgatcgcgaaaagcgaacaggagataggcaaggctacagccaaatacttcttttattctaacattatgaatttctttaagacggaaatcactctggcaaacggagagatacgcaaacgacctttaattgaaaccaatggggagacaggtgaaatcgtatgggataagggccgggacttcgcgacggtgagaaaagttttgtccatgccccaagtcaacatagtaaagaaaactgaggtgcagaccggagggttttcaaaggaatcgattcttccaaaaaggaatagtgataagctcatcgctcgtaaaaaggactgggacccgaaaaagtacggtggcttcgatagccctacagttgcctattctgtcctagtagtggcaaaagttgagaagggaaaatccaagaaactgaagtcagtcaaagaattattggggataacgattatggagcgctcgtcttttgaaaagaaccccatcgacttccttgaggcgaaaggttacaaggaagtaaaaaaggatctcataattaaactaccaaagtatagtctgtttgagttagaaaatggccgaaaacggatgttggctagcgccggagagcttcaaaaggggaacgaactcgcactaccgtctaaatacgtgaatttcctgtatttagcgtcccattacgagaagttgaaaggttcacctgaagataacgaacagaagcaactttttgttgagcagcacaaacattatctcgacgaaatcatagagcaaatttcggaattcagtaagagagtcatcctagctgatgccaatctggacaaagtattaagcgcatacaacaagcacagggataaacccatacgtgagcaggcggaaaatattatccatttgtttactcttaccaacctcggcgctccagccgcattcaagtattttgacacaacgatagatcgcaaacgatacacttctaccaaggaggtgctagacgcgacactgattcaccaatccatcacgggattatatgaaactcggatagatttgtcacagcttgggggtgacaactcaaagaaaaggtcactggaggacaacgaaacggaaatcaaagtctccagagacacctggaacactaagaacatgcggtccctggaaccgccacgaagcaagaaacggatacat

SEQ ID NO: 212 - DNA, 4959 bp, Artificial Sequence
  chemically synthesized
atgcccaaaaagaagaggaaagtcagctcttttttggacggtattgacaaagctcaggacgaacatgaaaagtaccactctaactggagagctatggcctccgattttaatcttccgccggtggtagcgaaagaaatcgttgccagttgcgacaaatgccaattgaagggagaagccatgcatggtcaagtggattgttcccccggaatatggcaactcgattgcacgcatctggaaggcaaggtcatcctcgtagcggtacatgttgcttctggatatattgaggccgaggttataccggcagaaacgggccaagaaacagcgtactttctcctgaagcttgcgggacgctggcctgtgaaaacgattcataccgacaacggttctaactttaccggagcaacagtacgggccgcatgctggtgggccggtataaagcaggaatttgggattccatacaatccgcaaagtcaaggtgtcgtcgagtctatgaataaggaactcaaaaagataattggtcaggttagagatcaagccgaacatctcaagacggcggtccaaatggcagtttttattcacaactttaagaggaaaggtgggattggtggctattcagcaggggagcgaatagtggacataatagcaaccgacatacagactaaggagttgcaaaagcagatcacaaagattcaaaatgggggcgggggaagcggcggtggaggtagtggagggggaggatcagataaaaagtattctattggtttagccatcggcactaattccgttggatgggctgtcataaccgatgaatacaaagtaccttcaaagaaatttaaggtgttggggaacacagaccgtcattcgattaaaaagaatcttatcggtgccctcctattcgatagtggcgaaacggcagaggcgactcgcctgaaacgaaccgctcggagaaggtatacacgtcgcaagaaccgaatatgttacttacaagaaatttttagcaatgagatggccaaagttgacgattctttctttcaccgtttggaagagtccttccttgtcgaagaggacaagaaacatgaacggcaccccatctttggaaacatagtagatgaggtggcatatcatgaaaagtacccaacgatttatcacctcagaaaaaagctagttgactcaactgataaagcggacctgaggttaatctacttggctcttgcccatatgataaagttccgtgggcactttctcattgagggtgatctaaatccggacaactcggatgtcgacaaactgttcatccagttagtacaaacctataatcagttgtttgaagagaaccctataaatgcaagtggcgtggatgcgaaggctattcttagcgcccgcctctctaaatcccgacggctagaaaacctgatcgcacaattacccggagagaagaaaaatgggttgttcggtaaccttatagcgctctcactaggcctgacaccaaattttaagtcgaacttcgacttagctgaagatgccaaattgcagcttagtaaggacacgtacgatgacgatctcgacaatctactggcacaaattggagatcagtatgcggacttatttttggctgccaaaaaccttagcgatgcaatcctcctatctgacatactgagagttaatactgagattaccaaggcgccgttatccgcttcaatgatcaaaaggtacgatgaacatcaccaagacttgacacttctcaaggccctagtccgtcagcaactgcctgagaaatataaggaaatattctttgatcagtcgaaaaacgggtacgcaggttatattgacggcggagcgagtcaagaggaattctacaagtttatcaaacccatattagagaagatggatgggacggaagagttgcttgtaaaactcaatcgcgaagatctactgcgaaagcagcggactttcgacaacggtagcattccacatcaaatccacttaggcgaattgcatgctatacttagaaggcaggaggatttttatccgttcctcaaagacaatcgtgaaaagattgagaaaatcctaacctttcgcataccttactatgtgggacccctggcccgagggaactctcggttcgcatggatgacaagaaagtccgaagaaacgattactccatggaattttgaggaagttgtcgataaaggtgcgtcagctcaatcgttcatcgagaggatgaccaactttgacaagaatttaccgaacgaaaaagtattgcctaagcacagtttactttacgagtatttcacagtgtacaatgaactcacgaaagttaagtatgtcactgagggcatgcgtaaacccgcctttctaagcggagaacagaagaaagcaatagtagatctgttattcaagaccaaccgcaaagtgacagttaagcaattgaaagaggactactttaagaaaattgaatgcttcgattctgtcgagatctccggggtagaagatcgatttaatgcgtcacttggtacgtatcatgacctcctaaagataattaaagataaggacttcctggataacgaagagaatgaagatatcttagaagatatagtgttgactcttaccctctttgaagatcgggaaatgattgaggaaagactaaaaacatacgctcacctgttcgacgataaggttatgaaacagttaaagaggcgtcgctatacgggctggggacgattgtcgcggaaacttatcaacgggataagagacaagcaaagtggtaaaactattctcgattttctaaagagcgacggcttcgccaataggaactttatgcagctgatccatgatgactctttaaccttcaaagaggatatacaaaaggcacaggtttccggacaaggggactcattgcacgaacatattgcgaatcttgctggttcgccagccatcaaaaagggcatactccagacagtcaaagtagtggatgagctagttaaggtcatgggacgtcacaaaccggaaaacattgtaatcgagatggcacgcgaaaatcaaacgactcagaaggggcaaaaaaacagtcgagagcggatgaagagaatagaagagggtattaaagaactgggcagccagatcttaaaggagcatcctgtggaaaatacccaattgcagaacgagaaactttacctctattacctacaaaatggaagggacatgtatgttgatcaggaactggacataaaccgtttatctgattacgacgtcgatgccattgtaccccaatcctttttgaaggacgattcaatcgacaataaagtgcttacacgctcggataagaaccgagggaaaagtgacaatgttccaagcgaggaagtcgtaaagaaaatgaagaactattggcggcagctcctaaatgcgaaactgataacgcaaagaaagttcgataacttaactaaagctgagaggggtggcttgtctgaacttgacaaggccggatttattaaacgtcagctcgtggaaacccgccaaatcacaaagcatgttgcacagatactagattcccgaatgaatacgaaatacgacgagaacgataagctgattcgggaagtcaaagtaatcactttaaagtcaaaattggtgtcggacttcagaaaggattttcaattctataaagttagggagataaataactaccaccatgcgcacgacgcttatcttaatgccgtcgtagggaccgcactcattaagaaatacccgaagctagaaagtgagtttgtgtatggtgattacaaagtttatgacgtccgtaagatgatcgcgaaaagcgaacaggagataggcaaggctacagccaaatacttcttttattctaacattatgaatttctttaagacggaaatcactctggcaaacggagagatacgcaaacgacctttaattgaaaccaatggggagacaggtgaaatcgtatgggataagggccgggacttcgcgacggtgagaaaagttttgtccatgccccaagtcaacatagtaaagaaaactgaggtgcagaccggagggttttcaaaggaatcgattcttccaaaaaggaatagtgataagctcatcgctcgtaaaaaggactgggacccgaaaaagtacggtggcttcgatagccctacagttgcctattctgtcctagtagtggcaaaagttgagaagggaaaatccaagaaactgaagtcagtcaaagaattattggggataacgattatggagcgctcgtcttttgaaaagaaccccatcgacttccttgaggcgaaaggttacaaggaagtaaaaaaggatctcataattaaactaccaaagtatagtctgtttgagttagaaaatggccgaaaacggatgttggctagcgccggagagcttcaaaaggggaacgaactcgcactaccgtctaaatacgtgaatttcctgtatttagcgtcccattacgagaagttgaaaggttcacctgaagataacgaacagaagcaactttttgttgagcagcacaaacattatctcgacgaaatcatagagcaaatttcggaattcagtaagagagtcatcctagctgatgccaatctggacaaagtattaagcgcatacaacaagcacagggataaacccatacgtgagcaggcggaaaatattatccatttgtttactcttaccaacctcggcgctccagccgcattcaagtattttgacacaacgatagatcgcaaacgatacacttctaccaaggaggtgctagacgcgacactgattcaccaatccatcacgggattatatgaaactcggatagatttgtcacagcttgggggtgacaactcaaagaaaaggtcactggaggacaacgaaacggaaatcaaagtctccagagacacctggaacactaagaacatgcggtccctggaaccgccacgaagcaagaaacggatacat

SEQ ID NO: 213 - DNA, 5670 bp, Artificial Sequence
  chemically synthesized
atgcccaaaaagaagaggaaagtcagctctttcctggatggcattgataaagcgcaggatgagcacgaaaaatatcactctaactggcgcgctatggcaagcgatttcaacctcccccccgtggtggctaaagagattgtcgcgtcctgcgacaagtgccaacttaagggtgaagctatgcacggtcaagtcgactgctctccagggatatggcaattggactgcacacaccttgaaggcaaagtaatactggttgccgtacacgtggcttctggatatattgaagccgaggtgattcctgcggaaacaggacaggagacagcctactttctgctgaagctcgcggggagatggccagtcaagacaattcacacagacaatggctctaactttacgggagctacagtgcgggcagcctgctggtgggcggggatcaagcaagaatttggtatcccctacaacccgcagtcccagggtgtggttgagtctatgaataaggaactgaaaaaaatcattggacaggttcgcgatcaagcggagcacctgaagactgcggtacaaatggctgtatttatccataactttaagaggaaaggtggcattggtgggtactcagcgggtgagcggatcgtagacattatagcgacagacatacagacgaaagagcttcagaaacaaataaccaaaatccagaatggcgggggaggatctggcggtggcggctctggtggcggcgggagttttctggacggaattgataaggcacaggacgaacacgaaaagtatcactctaattggagagcgatggcaagtgattttaacttgccccctgttgtagctaaggaaatagttgcaagttgcgataagtgccagcttaaaggcgaggcaatgcacggccaggtcgactgttcacctgggatttggcagctcgactgcactcatcttgaggggaaagtaatccttgtggcagtgcacgtagcgagtggttacatcgaagcagaagtaatacctgctgagacgggacaagagactgcctatttcctgctcaaacttgctggaagatggcccgtcaagacaattcatactgataacggaagcaattttacgggtgcgacagttagagcagcttgttggtgggctgggataaaacaggagtttgggattccatataacccgcaatcacagggggtagtggagagtatgaacaaggagcttaagaaaattattggtcaagtcagagaccaagcggagcatctgaaaactgctgtgcagatggccgtctttatacacaattttaaaaggaagggagggatcggcggttacagcgccggtgagagaatagtagatatcattgccaccgatatccaaaccaaagaacttcaaaaacaaattaccaaaatacaaaatggaggaggtggaagcggaggaggaggaagcgggggagggggctctgataaaaagtattctattggtttagccatcggcactaattccgttggatgggctgtcataaccgatgaatacaaagtaccttcaaagaaatttaaggtgttggggaacacagaccgtcattcgattaaaaagaatcttatcggtgccctcctattcgatagtggcgaaacggcagaggcgactcgcctgaaacgaaccgctcggagaaggtatacacgtcgcaagaaccgaatatgttacttacaagaaatttttagcaatgagatggccaaagttgacgattctttctttcaccgtttggaagagtccttccttgtcgaagaggacaagaaacatgaacggcaccccatctttggaaacatagtagatgaggtggcatatcatgaaaagtacccaacgatttatcacctcagaaaaaagctagttgactcaactgataaagcggacctgaggttaatctacttggctcttgcccatatgataaagttccgtgggcactttctcattgagggtgatctaaatccggacaactcggatgtcgacaaactgttcatccagttagtacaaacctataatcagttgtttgaagagaaccctataaatgcaagtggcgtggatgcgaaggctattcttagcgcccgcctctctaaatcccgacggctagaaaacctgatcgcacaattacccggagagaagaaaaatgggttgttcggtaaccttatagcgctctcactaggcctgacaccaaattttaagtcgaacttcgacttagctgaagatgccaaattgcagcttagtaaggacacgtacgatgacgatctcgacaatctactggcacaaattggagatcagtatgcggacttatttttggctgccaaaaaccttagcgatgcaatcctcctatctgacatactgagagttaatactgagattaccaaggcgccgttatccgcttcaatgatcaaaaggtacgatgaacatcaccaagacttgacacttctcaaggccctagtccgtcagcaactgcctgagaaatataaggaaatattctttgatcagtcgaaaaacgggtacgcaggttatattgacggcggagcgagtcaagaggaattctacaagtttatcaaacccatattagagaagatggatgggacggaagagttgcttgtaaaactcaatcgcgaagatctactgcgaaagcagcggactttcgacaacggtagcattccacatcaaatccacttaggcgaattgcatgctatacttagaaggcaggaggatttttatccgttcctcaaagacaatcgtgaaaagattgagaaaatcctaacctttcgcataccttactatgtgggacccctggcccgagggaactctcggttcgcatggatgacaagaaagtccgaagaaacgattactccatggaattttgaggaagttgtcgataaaggtgcgtcagctcaatcgttcatcgagaggatgaccaactttgacaagaatttaccgaacgaaaaagtattgcctaagcacagtttactttacgagtatttcacagtgtacaatgaactcacgaaagttaagtatgtcactgagggcatgcgtaaacccgcctttctaagcggagaacagaagaaagcaatagtagatctgttattcaagaccaaccgcaaagtgacagttaagcaattgaaagaggactactttaagaaaattgaatgcttcgattctgtcgagatctccggggtagaagatcgatttaatgcgtcacttggtacgtatcatgacctcctaaagataattaaagataaggacttcctggataacgaagagaatgaagatatcttagaagatatagtgttgactcttaccctctttgaagatcgggaaatgattgaggaaagactaaaaacatacgctcacctgttcgacgataaggttatgaaacagttaaagaggcgtcgctatacgggctggggacgattgtcgcggaaacttatcaacgggataagagacaagcaaagtggtaaaactattctcgattttctaaagagcgacggcttcgccaataggaactttatgcagctgatccatgatgactctttaaccttcaaagaggatatacaaaaggcacaggtttccggacaaggggactcattgcacgaacatattgcgaatcttgctggttcgccagccatcaaaaagggcatactccagacagtcaaagtagtggatgagctagttaaggtcatgggacgtcacaaaccggaaaacattgtaatcgagatggcacgcgaaaatcaaacgactcagaaggggcaaaaaaacagtcgagagcggatgaagagaatagaagagggtattaaagaactgggcagccagatcttaaaggagcatcctgtggaaaatacccaattgcagaacgagaaactttacctctattacctacaaaatggaagggacatgtatgttgatcaggaactggacataaaccgtttatctgattacgacgtcgatgccattgtaccccaatcctttttgaaggacgattcaatcgacaataaagtgcttacacgctcggataagaaccgagggaaaagtgacaatgttccaagcgaggaagtcgtaaagaaaatgaagaactattggcggcagctcctaaatgcgaaactgataacgcaaagaaagttcgataacttaactaaagctgagaggggtggcttgtctgaacttgacaaggccggatttattaaacgtcagctcgtggaaacccgccaaatcacaaagcatgttgcacagatactagattcccgaatgaatacgaaatacgacgagaacgataagctgattcgggaagtcaaagtaatcactttaaagtcaaaattggtgtcggacttcagaaaggattttcaattctataaagttagggagataaataactaccaccatgcgcacgacgcttatcttaatgccgtcgtagggaccgcactcattaagaaatacccgaagctagaaagtgagtttgtgtatggtgattacaaagtttatgacgtccgtaagatgatcgcgaaaagcgaacaggagataggcaaggctacagccaaatacttcttttattctaacattatgaatttctttaagacggaaatcactctggcaaacggagagatacgcaaacgacctttaattgaaaccaatggggagacaggtgaaatcgtatgggataagggccgggacttcgcgacggtgagaaaagttttgtccatgccccaagtcaacatagtaaagaaaactgaggtgcagaccggagggttttcaaaggaatcgattcttccaaaaaggaatagtgataagctcatcgctcgtaaaaaggactgggacccgaaaaagtacggtggcttcgatagccctacagttgcctattctgtcctagtagtggcaaaagttgagaagggaaaatccaagaaactgaagtcagtcaaagaattattggggataacgattatggagcgctcgtcttttgaaaagaaccccatcgacttccttgaggcgaaaggttacaaggaagtaaaaaaggatctcataattaaactaccaaagtatagtctgtttgagttagaaaatggccgaaaacggatgttggctagcgccggagagcttcaaaaggggaacgaactcgcactaccgtctaaatacgtgaatttcctgtatttagcgtcccattacgagaagttgaaaggttcacctgaagataacgaacagaagcaactttttgttgagcagcacaaacattatctcgacgaaatcatagagcaaatttcggaattcagtaagagagtcatcctagctgatgccaatctggacaaagtattaagcgcatacaacaagcacagggataaacccatacgtgagcaggcggaaaatattatccatttgtttactcttaccaacctcggcgctccagccgcattcaagtattttgacacaacgatagatcgcaaacgatacacttctaccaaggaggtgctagacgcgacactgattcaccaatccatcacgggattatatgaaactcggatagatttgtcacagcttgggggtgacaactcaaagaaaaggtcactggaggacaacgaaacggaaatcaaagtctccagagacacctggaacactaagaacatgcggtccctggaaccgccacgaagcaagaaacggatacat

SEQ ID NO: 214 - DNA, 5157 bp, Artificial Sequence
  chemically synthesized
atgcccaaaaagaagaggaaagtcagctcttttttggacggtattgacaaagctcaggacgaacatgaaaagtaccactctaactggagagctatggcctccgattttaatcttccgccggtggtagcgaaagaaatcgttgccagttgcgacaaatgccaattgaagggagaagccatgcatggtcaagtggattgttcccccggaatatggcaactcgattgcacgcatctggaaggcaaggtcatcctcgtagcggtacatgttgcttctggatatattggcgccgaggttataccggcagaaacgggccaagaaacagcgtactttctcctgaagcttgcgggacgctggcctgtgaaaacgattcataccgacaacggttctaactttaccggagcaacagtacgggccgcatgctggtgggccggtataaagcaggaatttgggattccatacaatccgcaaagtcaaggtgtcgtcgagtctatgaataaggaactcaaaaagataattggtcaggttagagatcaagccgaacatctcaagacggcggtccaaatggcagtttttattcacaactttaagaggaaaggtgggattggtggctattcagcaggggagcgaatagtggacataatagcaaccgacatacagactaaggagttgcaaaagcagatcacaaagattcaaaattttcgggtttattaccgcgatagccggaatccgctttggaaaggtcctgcgaaacttttgtggaagggcgagggagctgtcgtcattcaggataacagcgacatcaaggtcgttccgcggcgcaaggcgaaaatcatacgggactatggtaaacaaatggccggggatgactgcgttgcgtcccggcaagacgaggatgggggcgggggaagcggcggtggaggtagtggagggggaggatcagataaaaagtattctattggtttagccatcggcactaattccgttggatgggctgtcataaccgatgaatacaaagtaccttcaaagaaatttaaggtgttggggaacacagaccgtcattcgattaaaaagaatcttatcggtgccctcctattcgatagtggcgaaacggcagaggcgactcgcctgaaacgaaccgctcggagaaggtatacacgtcgcaagaaccgaatatgttacttacaagaaatttttagcaatgagatggccaaagttgacgattctttctttcaccgtttggaagagtccttccttgtcgaagaggacaagaaacatgaacggcaccccatctttggaaacatagtagatgaggtggcatatcatgaaaagtacccaacgatttatcacctcagaaaaaagctagttgactcaactgataaagcggacctgaggttaatctacttggctcttgcccatatgataaagttccgtgggcactttctcattgagggtgatctaaatccggacaactcggatgtcgacaaactgttcatccagttagtacaaacctataatcagttgtttgaagagaaccctataaatgcaagtggcgtggatgcgaaggctattcttagcgcccgcctctctaaatcccgacggctagaaaacctgatcgcacaattacccggagagaagaaaaatgggttgttcggtaaccttatagcgctctcactaggcctgacaccaaattttaagtcgaacttcgacttagctgaagatgccaaattgcagcttagtaaggacacgtacgatgacgatctcgacaatctactggcacaaattggagatcagtatgcggacttatttttggctgccaaaaaccttagcgatgcaatcctcctatctgacatactgagagttaatactgagattaccaaggcgccgttatccgcttcaatgatcaaaaggtacgatgaacatcaccaagacttgacacttctcaaggccctagtccgtcagcaactgcctgagaaatataaggaaatattctttgatcagtcgaaaaacgggtacgcaggttatattgacggcggagcgagtcaagaggaattctacaagtttatcaaacccatattagagaagatggatgggacggaagagttgcttgtaaaactcaatcgcgaagatctactgcgaaagcagcggactttcgacaacggtagcattccacatcaaatccacttaggcgaattgcatgctatacttagaaggcaggaggatttttatccgttcctcaaagacaatcgtgaaaagattgagaaaatcctaacctttcgcataccttactatgtgggacccctggcccgagggaactctcggttcgcatggatgacaagaaagtccgaagaaacgattactccatggaattttgaggaagttgtcgataaaggtgcgtcagctcaatcgttcatcgagaggatgaccaactttgacaagaatttaccgaacgaaaaagtattgcctaagcacagtttactttacgagtatttcacagtgtacaatgaactcacgaaagttaagtatgtcactgagggcatgcgtaaacccgcctttctaagcggagaacagaagaaagcaatagtagatctgttattcaagaccaaccgcaaagtgacagttaagcaattgaaagaggactactttaagaaaattgaatgcttcgattctgtcgagatctccggggtagaagatcgatttaatgcgtcacttggtacgtatcatgacctcctaaagataattaaagataaggacttcctggataacgaagagaatgaagatatcttagaagatatagtgttgactcttaccctctttgaagatcgggaaatgattgaggaaagactaaaaacatacgctcacctgttcgacgataaggttatgaaacagttaaagaggcgtcgctatacgggctggggacgattgtcgcggaaacttatcaacgggataagagacaagcaaagtggtaaaactattctcgattttctaaagagcgacggcttcgccaataggaactttatgcagctgatccatgatgactctttaaccttcaaagaggatatacaaaaggcacaggtttccggacaaggggactcattgcacgaacatattgcgaatcttgctggttcgccagccatcaaaaagggcatactccagacagtcaaagtagtggatgagctagttaaggtcatgggacgtcacaaaccggaaaacattgtaatcgagatggcacgcgaaaatcaaacgactcagaaggggcaaaaaaacagtcgagagcggatgaagagaatagaagagggtattaaagaactgggcagccagatcttaaaggagcatcctgtggaaaatacccaattgcagaacgagaaactttacctctattacctacaaaatggaagggacatgtatgttgatcaggaactggacataaaccgtttatctgattacgacgtcgatgccattgtaccccaatcctttttgaaggacgattcaatcgacaataaagtgcttacacgctcggataagaaccgagggaaaagtgacaatgttccaagcgaggaagtcgtaaagaaaatgaagaactattggcggcagctcctaaatgcgaaactgataacgcaaagaaagttcgataacttaactaaagctgagaggggtggcttgtctgaacttgacaaggccggatttattaaacgtcagctcgtggaaacccgccaaatcacaaagcatgttgcacagatactagattcccgaatgaatacgaaatacgacgagaacgataagctgattcgggaagtcaaagtaatcactttaaagtcaaaattggtgtcggacttcagaaaggattttcaattctataaagttagggagataaataactaccaccatgcgcacgacgcttatcttaatgccgtcgtagggaccgcactcattaagaaatacccgaagctagaaagtgagtttgtgtatggtgattacaaagtttatgacgtccgtaagatgatcgcgaaaagcgaacaggagataggcaaggctacagccaaatacttcttttattctaacattatgaatttctttaagacggaaatcactctggcaaacggagagatacgcaaacgacctttaattgaaaccaatggggagacaggtgaaatcgtatgggataagggccgggacttcgcgacggtgagaaaagttttgtccatgccccaagtcaacatagtaaagaaaactgaggtgcagaccggagggttttcaaaggaatcgattcttccaaaaaggaatagtgataagctcatcgctcgtaaaaaggactgggacccgaaaaagtacggtggcttcgatagccctacagttgcctattctgtcctagtagtggcaaaagttgagaagggaaaatccaagaaactgaagtcagtcaaagaattattggggataacgattatggagcgctcgtcttttgaaaagaaccccatcgacttccttgaggcgaaaggttacaaggaagtaaaaaaggatctcataattaaactaccaaagtatagtctgtttgagttagaaaatggccgaaaacggatgttggctagcgccggagagcttcaaaaggggaacgaactcgcactaccgtctaaatacgtgaatttcctgtatttagcgtcccattacgagaagttgaaaggttcacctgaagataacgaacagaagcaactttttgttgagcagcacaaacattatctcgacgaaatcatagagcaaatttcggaattcagtaagagagtcatcctagctgatgccaatctggacaaagtattaagcgcatacaacaagcacagggataaacccatacgtgagcaggcggaaaatattatccatttgtttactcttaccaacctcggcgctccagccgcattcaagtattttgacacaacgatagatcgcaaacgatacacttctaccaaggaggtgctagacgcgacactgattcaccaatccatcacgggattatatgaaactcggatagatttgtcacagcttgggggtgacaactcaaagaaaaggtcactggaggacaacgaaacggaaatcaaagtctccagagacacctggaacactaagaacatgcggtccctggaaccgccacgaagcaagaaacggatacat

SEQ ID NO: 215 - DNA, 4959 bp, Artificial Sequence
  chemically synthesized
atgcccaaaaagaagaggaaagtcagctcttttttggacggtattgacaaagctcaggacgaacatgaaaagtaccactctaactggagagctatggcctccgattttaatcttccgccggtggtagcgaaagaaatcgttgccagttgcgacaaatgccaattgaagggagaagccatgcatggtcaagtggattgttcccccggaatatggcaactcgattgcacgcatctggaaggcaaggtcatcctcgtagcggtacatgttgcttctggatatattggcgccgaggttataccggcagaaacgggccaagaaacagcgtactttctcctgaagcttgcgggacgctggcctgtgaaaacgattcataccgacaacggttctaactttaccggagcaacagtacgggccgcatgctggtgggccggtataaagcaggaatttgggattccatacaatccgcaaagtcaaggtgtcgtcgagtctatgaataaggaactcaaaaagataattggtcaggttagagatcaagccgaacatctcaagacggcggtccaaatggcagtttttattcacaactttaagaggaaaggtgggattggtggctattcagcaggggagcgaatagtggacataatagcaaccgacatacagactaaggagttgcaaaagcagatcacaaagattcaaaatgggggcgggggaagcggcggtggaggtagtggagggggaggatcagataaaaagtattctattggtttagccatcggcactaattccgttggatgggctgtcataaccgatgaatacaaagtaccttcaaagaaatttaaggtgttggggaacacagaccgtcattcgattaaaaagaatcttatcggtgccctcctattcgatagtggcgaaacggcagaggcgactcgcctgaaacgaaccgctcggagaaggtatacacgtcgcaagaaccgaatatgttacttacaagaaatttttagcaatgagatggccaaagttgacgattctttctttcaccgtttggaagagtccttccttgtcgaagaggacaagaaacatgaacggcaccccatctttggaaacatagtagatgaggtggcatatcatgaaaagtacccaacgatttatcacctcagaaaaaagctagttgactcaactgataaagcggacctgaggttaatctacttggctcttgcccatatgataaagttccgtgggcactttctcattgagggtgatctaaatccggacaactcggatgtcgacaaactgttcatccagttagtacaaacctataatcagttgtttgaagagaaccctataaatgcaagtggcgtggatgcgaaggctattcttagcgcccgcctctctaaatcccgacggctagaaaacctgatcgcacaattacccggagagaagaaaaatgggttgttcggtaaccttatagcgctctcactaggcctgacaccaaattttaagtcgaacttcgacttagctgaagatgccaaattgcagcttagtaaggacacgtacgatgacgatctcgacaatctactggcacaaattggagatcagtatgcggacttatttttggctgccaaaaaccttagcgatgcaatcctcctatctgacatactgagagttaatactgagattaccaaggcgccgttatccgcttcaatgatcaaaaggtacgatgaacatcaccaagacttgacacttctcaaggccctagtccgtcagcaactgcctgagaaatataaggaaatattctttgatcagtcgaaaaacgggtacgcaggttatattgacggcggagcgagtcaagaggaattctacaagtttatcaaacccatattagagaagatggatgggacggaagagttgcttgtaaaactcaatcgcgaagatctactgcgaaagcagcggactttcgacaacggtagcattccacatcaaatccacttaggcgaattgcatgctatacttagaaggcaggaggatttttatccgttcctcaaagacaatcgtgaaaagattgagaaaatcctaacctttcgcataccttactatgtgggacccctggcccgagggaactctcggttcgcatggatgacaagaaagtccgaagaaacgattactccatggaattttgaggaagttgtcgataaaggtgcgtcagctcaatcgttcatcgagaggatgaccaactttgacaagaatttaccgaacgaaaaagtattgcctaagcacagtttactttacgagtatttcacagtgtacaatgaactcacgaaagttaagtatgtcactgagggcatgcgtaaacccgcctttctaagcggagaacagaagaaagcaatagtagatctgttattcaagaccaaccgcaaagtgacagttaagcaattgaaagaggactactttaagaaaattgaatgcttcgattctgtcgagatctccggggtagaagatcgatttaatgcgtcacttggtacgtatcatgacctcctaaagataattaaagataaggacttcctggataacgaagagaatgaagatatcttagaagatatagtgttgactcttaccctctttgaagatcgggaaatgattgaggaaagactaaaaacatacgctcacctgttcgacgataaggttatgaaacagttaaagaggcgtcgctatacgggctggggacgattgtcgcggaaacttatcaacgggataagagacaagcaaagtggtaaaactattctcgattttctaaagagcgacggcttcgccaataggaactttatgcagctgatccatgatgactctttaaccttcaaagaggatatacaaaaggcacaggtttccggacaaggggactcattgcacgaacatattgcgaatcttgctggttcgccagccatcaaaaagggcatactccagacagtcaaagtagtggatgagctagttaaggtcatgggacgtcacaaaccggaaaacattgtaatcgagatggcacgcgaaaatcaaacgactcagaaggggcaaaaaaacagtcgagagcggatgaagagaatagaagagggtattaaagaactgggcagccagatcttaaaggagcatcctgtggaaaatacccaattgcagaacgagaaactttacctctattacctacaaaatggaagggacatgtatgttgatcaggaactggacataaaccgtttatctgattacgacgtcgatgccattgtaccccaatcctttttgaaggacgattcaatcgacaataaagtgcttacacgctcggataagaaccgagggaaaagtgacaatgttccaagcgaggaagtcgtaaagaaaatgaagaactattggcggcagctcctaaatgcgaaactgataacgcaaagaaagttcgataacttaactaaagctgagaggggtggcttgtctgaacttgacaaggccggatttattaaacgtcagctcgtggaaacccgccaaatcacaaagcatgttgcacagatactagattcccgaatgaatacgaaatacgacgagaacgataagctgattcgggaagtcaaagtaatcactttaaagtcaaaattggtgtcggacttcagaaaggattttcaattctataaagttagggagataaataactaccaccatgcgcacgacgcttatcttaatgccgtcgtagggaccgcactcattaagaaatacccgaagctagaaagtgagtttgtgtatggtgattacaaagtttatgacgtccgtaagatgatcgcgaaaagcgaacaggagataggcaaggctacagccaaatacttcttttattctaacattatgaatttctttaagacggaaatcactctggcaaacggagagatacgcaaacgacctttaattgaaaccaatggggagacaggtgaaatcgtatgggataagggccgggacttcgcgacggtgagaaaagttttgtccatgccccaagtcaacatagtaaagaaaactgaggtgcagaccggagggttttcaaaggaatcgattcttccaaaaaggaatagtgataagctcatcgctcgtaaaaaggactgggacccgaaaaagtacggtggcttcgatagccctacagttgcctattctgtcctagtagtggcaaaagttgagaagggaaaatccaagaaactgaagtcagtcaaagaattattggggataacgattatggagcgctcgtcttttgaaaagaaccccatcgacttccttgaggcgaaaggttacaaggaagtaaaaaaggatctcataattaaactaccaaagtatagtctgtttgagttagaaaatggccgaaaacggatgttggctagcgccggagagcttcaaaaggggaacgaactcgcactaccgtctaaatacgtgaatttcctgtatttagcgtcccattacgagaagttgaaaggttcacctgaagataacgaacagaagcaactttttgttgagcagcacaaacattatctcgacgaaatcatagagcaaatttcggaattcagtaagagagtcatcctagctgatgccaatctggacaaagtattaagcgcatacaacaagcacagggataaacccatacgtgagcaggcggaaaatattatccatttgtttactcttaccaacctcggcgctccagccgcattcaagtattttgacacaacgatagatcgcaaacgatacacttctaccaaggaggtgctagacgcgacactgattcaccaatccatcacgggattatatgaaactcggatagatttgtcacagcttgggggtgacaactcaaagaaaaggtcactggaggacaacgaaacggaaatcaaagtctccagagacacctggaacactaagaacatgcggtccctggaaccgccacgaagcaagaaacggatacat

SEQ ID NO: 216 - DNA, 5157 bp, Artificial Sequence
  chemically synthesized
atgcccaaaaagaagaggaaagtcagctcttttttggacggtattgacaaagctcaggacgaacatgaaaagtaccactctaactggagagctatggcctccgattttaatcttccgccggtggtagcgaaagaaatcgttgccagttgcgacaaatgccaattgaagggagaagccatgcatggtcaagtggattgttcccccggaatatggcaactcgattgcacgcatctggaaggcaaggtcatcctcgtagcggtacatgttgcttctggatatattttcgccgaggttataccggcagaaacgggccaagaaacagcgtactttctcctgaagcttgcgggacgctggcctgtgaaaacgattcataccgacaacggttctaactttaccggagcaacagtacgggccgcatgctggtgggccggtataaagcaggaatttgggattccatacaatccgcaaagtcaaggtgtcgtcgagtctatgaataaggaactcaaaaagataattggtcaggttagagatcaagccgaacatctcaagacggcggtccaaatggcagtttttattcacaactttaagaggaaaggtgggattggtggctattcagcaggggagcgaatagtggacataatagcaaccgacatacagactaaggagttgcaaaagcagatcacaaagattcaaaattttcgggtttattaccgcgatagccggaatccgctttggaaaggtcctgcgaaacttttgtggaagggcgagggagctgtcgtcattcaggataacagcgacatcaaggtcgttccgcggcgcaaggcgaaaatcatacgggactatggtaaacaaatggccggggatgactgcgttgcgtcccggcaagacgaggatgggggcgggggaagcggcggtggaggtagtggagggggaggatcagataaaaagtattctattggtttagccatcggcactaattccgttggatgggctgtcataaccgatgaatacaaagtaccttcaaagaaatttaaggtgttggggaacacagaccgtcattcgattaaaaagaatcttatcggtgccctcctattcgatagtggcgaaacggcagaggcgactcgcctgaaacgaaccgctcggagaaggtatacacgtcgcaagaaccgaatatgttacttacaagaaatttttagcaatgagatggccaaagttgacgattctttctttcaccgtttggaagagtccttccttgtcgaagaggacaagaaacatgaacggcaccccatctttggaaacatagtagatgaggtggcatatcatgaaaagtacccaacgatttatcacctcagaaaaaagctagttgactcaactgataaagcggacctgaggttaatctacttggctcttgcccatatgataaagttccgtgggcactttctcattgagggtgatctaaatccggacaactcggatgtcgacaaactgttcatccagttagtacaaacctataatcagttgtttgaagagaaccctataaatgcaagtggcgtggatgcgaaggctattcttagcgcccgcctctctaaatcccgacggctagaaaacctgatcgcacaattacccggagagaagaaaaatgggttgttcggtaaccttatagcgctctcactaggcctgacaccaaattttaagtcgaacttcgacttagctgaagatgccaaattgcagcttagtaaggacacgtacgatgacgatctcgacaatctactggcacaaattggagatcagtatgcggacttatttttggctgccaaaaaccttagcgatgcaatcctcctatctgacatactgagagttaatactgagattaccaaggcgccgttatccgcttcaatgatcaaaaggtacgatgaacatcaccaagacttgacacttctcaaggccctagtccgtcagcaactgcctgagaaatataaggaaatattctttgatcagtcgaaaaacgggtacgcaggttatattgacggcggagcgagtcaagaggaattctacaagtttatcaaacccatattagagaagatggatgggacggaagagttgcttgtaaaactcaatcgcgaagatctactgcgaaagcagcggactttcgacaacggtagcattccacatcaaatccacttaggcgaattgcatgctatacttagaaggcaggaggatttttatccgttcctcaaagacaatcgtgaaaagattgagaaaatcctaacctttcgcataccttactatgtgggacccctggcccgagggaactctcggttcgcatggatgacaagaaagtccgaagaaacgattactccatggaattttgaggaagttgtcgataaaggtgcgtcagctcaatcgttcatcgagaggatgaccaactttgacaagaatttaccgaacgaaaaagtattgcctaagcacagtttactttacgagtatttcacagtgtacaatgaactcacgaaagttaagtatgtcactgagggcatgcgtaaacccgcctttctaagcggagaacagaagaaagcaatagtagatctgttattcaagaccaaccgcaaagtgacagttaagcaattgaaagaggactactttaagaaaattgaatgcttcgattctgtcgagatctccggggtagaagatcgatttaatgcgtcacttggtacgtatcatgacctcctaaagataattaaagataaggacttcctggataacgaagagaatgaagatatcttagaagatatagtgttgactcttaccctctttgaagatcgggaaatgattgaggaaagactaaaaacatacgctcacctgttcgacgataaggttatgaaacagttaaagaggcgtcgctatacgggctggggacgattgtcgcggaaacttatcaacgggataagagacaagcaaagtggtaaaactattctcgattttctaaagagcgacggcttcgccaataggaactttatgcagctgatccatgatgactctttaaccttcaaagaggatatacaaaaggcacaggtttccggacaaggggactcattgcacgaacatattgcgaatcttgctggttcgccagccatcaaaaagggcatactccagacagtcaaagtagtggatgagctagttaaggtcatgggacgtcacaaaccggaaaacattgtaatcgagatggcacgcgaaaatcaaacgactcagaaggggcaaaaaaacagtcgagagcggatgaagagaatagaagagggtattaaagaactgggcagccagatcttaaaggagcatcctgtggaaaatacccaattgcagaacgagaaactttacctctattacctacaaaatggaagggacatgtatgttgatcaggaactggacataaaccgtttatctgattacgacgtcgatgccattgtaccccaatcctttttgaaggacgattcaatcgacaataaagtgcttacacgctcggataagaaccgagggaaaagtgacaatgttccaagcgaggaagtcgtaaagaaaatgaagaactattggcggcagctcctaaatgcgaaactgataacgcaaagaaagttcgataacttaactaaagctgagaggggtggcttgtctgaacttgacaaggccggatttattaaacgtcagctcgtggaaacccgccaaatcacaaagcatgttgcacagatactagattcccgaatgaatacgaaatacgacgagaacgataagctgattcgggaagtcaaagtaatcactttaaagtcaaaattggtgtcggacttcagaaaggattttcaattctataaagttagggagataaataactaccaccatgcgcacgacgcttatcttaatgccgtcgtagggaccgcactcattaagaaatacccgaagctagaaagtgagtttgtgtatggtgattacaaagtttatgacgtccgtaagatgatcgcgaaaagcgaacaggagataggcaaggctacagccaaatacttcttttattctaacattatgaatttctttaagacggaaatcactctggcaaacggagagatacgcaaacgacctttaattgaaaccaatggggagacaggtgaaatcgtatgggataagggccgggacttcgcgacggtgagaaaagttttgtccatgccccaagtcaacatagtaaagaaaactgaggtgcagaccggagggttttcaaaggaatcgattcttccaaaaaggaatagtgataagctcatcgctcgtaaaaaggactgggacccgaaaaagtacggtggcttcgatagccctacagttgcctattctgtcctagtagtggcaaaagttgagaagggaaaatccaagaaactgaagtcagtcaaagaattattggggataacgattatggagcgctcgtcttttgaaaagaaccccatcgacttccttgaggcgaaaggttacaaggaagtaaaaaaggatctcataattaaactaccaaagtatagtctgtttgagttagaaaatggccgaaaacggatgttggctagcgccggagagcttcaaaaggggaacgaactcgcactaccgtctaaatacgtgaatttcctgtatttagcgtcccattacgagaagttgaaaggttcacctgaagataacgaacagaagcaactttttgttgagcagcacaaacattatctcgacgaaatcatagagcaaatttcggaattcagtaagagagtcatcctagctgatgccaatctggacaaagtattaagcgcatacaacaagcacagggataaacccatacgtgagcaggcggaaaatattatccatttgtttactcttaccaacctcggcgctccagccgcattcaagtattttgacacaacgatagatcgcaaacgatacacttctaccaaggaggtgctagacgcgacactgattcaccaatccatcacgggattatatgaaactcggatagatttgtcacagcttgggggtgacaactcaaagaaaaggtcactggaggacaacgaaacggaaatcaaagtctccagagacacctggaacactaagaacatgcggtccctggaaccgccacgaagcaagaaacggatacat

SEQ ID NO: 217 - DNA, 4959 bp, Artificial Sequence
  chemically synthesized
atgcccaaaaagaagaggaaagtcagctcttttttggacggtattgacaaagctcaggacgaacatgaaaagtaccactctaactggagagctatggcctccgattttaatcttccgccggtggtagcgaaagaaatcgttgccagttgcgacaaatgccaattgaagggagaagccatgcatggtcaagtggattgttcccccggaatatggcaactcgattgcacgcatctggaaggcaaggtcatcctcgtagcggtacatgttgcttctggatatattttcgccgaggttataccggcagaaacgggccaagaaacagcgtactttctcctgaagcttgcgggacgctggcctgtgaaaacgattcataccgacaacggttctaactttaccggagcaacagtacgggccgcatgctggtgggccggtataaagcaggaatttgggattccatacaatccgcaaagtcaaggtgtcgtcgagtctatgaataaggaactcaaaaagataattggtcaggttagagatcaagccgaacatctcaagacggcggtccaaatggcagtttttattcacaactttaagaggaaaggtgggattggtggctattcagcaggggagcgaatagtggacataatagcaaccgacatacagactaaggagttgcaaaagcagatcacaaagattcaaaatgggggcgggggaagcggcggtggaggtagtggagggggaggatcagataaaaagtattctattggtttagccatcggcactaattccgttggatgggctgtcataaccgatgaatacaaagtaccttcaaagaaatttaaggtgttggggaacacagaccgtcattcgattaaaaagaatcttatcggtgccctcctattcgatagtggcgaaacggcagaggcgactcgcctgaaacgaaccgctcggagaaggtatacacgtcgcaagaaccgaatatgttacttacaagaaatttttagcaatgagatggccaaagttgacgattctttctttcaccgtttggaagagtccttccttgtcgaagaggacaagaaacatgaacggcaccccatctttggaaacatagtagatgaggtggcatatcatgaaaagtacccaacgatttatcacctcagaaaaaagctagttgactcaactgataaagcggacctgaggttaatctacttggctcttgcccatatgataaagttccgtgggcactttctcattgagggtgatctaaatccggacaactcggatgtcgacaaactgttcatccagttagtacaaacctataatcagttgtttgaagagaaccctataaatgcaagtggcgtggatgcgaaggctattcttagcgcccgcctctctaaatcccgacggctagaaaacctgatcgcacaattacccggagagaagaaaaatgggttgttcggtaaccttatagcgctctcactaggcctgacaccaaattttaagtcgaacttcgacttagctgaagatgccaaattgcagcttagtaaggacacgtacgatgacgatctcgacaatctactggcacaaattggagatcagtatgcggacttatttttggctgccaaaaaccttagcgatgcaatcctcctatctgacatactgagagttaatactgagattaccaaggcgccgttatccgcttcaatgatcaaaaggtacgatgaacatcaccaagacttgacacttctcaaggccctagtccgtcagcaactgcctgagaaatataaggaaatattctttgatcagtcgaaaaacgggtacgcaggttatattgacggcggagcgagtcaagaggaattctacaagtttatcaaacccatattagagaagatggatgggacggaagagttgcttgtaaaactcaatcgcgaagatctactgcgaaagcagcggactttcgacaacggtagcattccacatcaaatccacttaggcgaattgcatgctatacttagaaggcaggaggatttttatccgttcctcaaagacaatcgtgaaaagattgagaaaatcctaacctttcgcataccttactatgtgggacccctggcccgagggaactctcggttcgcatggatgacaagaaagtccgaagaaacgattactccatggaattttgaggaagttgtcgataaaggtgcgtcagctcaatcgttcatcgagaggatgaccaactttgacaagaatttaccgaacgaaaaagtattgcctaagcacagtttactttacgagtatttcacagtgtacaatgaactcacgaaagttaagtatgtcactgagggcatgcgtaaacccgcctttctaagcggagaacagaagaaagcaatagtagatctgttattcaagaccaaccgcaaagtgacagttaagcaattgaaagaggactactttaagaaaattgaatgcttcgattctgtcgagatctccggggtagaagatcgatttaatgcgtcacttggtacgtatcatgacctcctaaagataattaaagataaggacttcctggataacgaagagaatgaagatatcttagaagatatagtgttgactcttaccctctttgaagatcgggaaatgattgaggaaagactaaaaacatacgctcacctgttcgacgataaggttatgaaacagttaaagaggcgtcgctatacgggctggggacgattgtcgcggaaacttatcaacgggataagagacaagcaaagtggtaaaactattctcgattttctaaagagcgacggcttcgccaataggaactttatgcagctgatccatgatgactctttaaccttcaaagaggatatacaaaaggcacaggtttccggacaaggggactcattgcacgaacatattgcgaatcttgctggttcgccagccatcaaaaagggcatactccagacagtcaaagtagtggatgagctagttaaggtcatgggacgtcacaaaccggaaaacattgtaatcgagatggcacgcgaaaatcaaacgactcagaaggggcaaaaaaacagtcgagagcggatgaagagaatagaagagggtattaaagaactgggcagccagatcttaaaggagcatcctgtggaaaatacccaattgcagaacgagaaactttacctctattacctacaaaatggaagggacatgtatgttgatcaggaactggacataaaccgtttatctgattacgacgtcgatgccattgtaccccaatcctttttgaaggacgattcaatcgacaataaagtgcttacacgctcggataagaaccgagggaaaagtgacaatgttccaagcgaggaagtcgtaaagaaaatgaagaactattggcggcagctcctaaatgcgaaactgataacgcaaagaaagttcgataacttaactaaagctgagaggggtggcttgtctgaacttgacaaggccggatttattaaacgtcagctcgtggaaacccgccaaatcacaaagcatgttgcacagatactagattcccgaatgaatacgaaatacgacgagaacgataagctgattcgggaagtcaaagtaatcactttaaagtcaaaattggtgtcggacttcagaaaggattttcaattctataaagttagggagataaataactaccaccatgcgcacgacgcttatcttaatgccgtcgtagggaccgcactcattaagaaatacccgaagctagaaagtgagtttgtgtatggtgattacaaagtttatgacgtccgtaagatgatcgcgaaaagcgaacaggagataggcaaggctacagccaaatacttcttttattctaacattatgaatttctttaagacggaaatcactctggcaaacggagagatacgcaaacgacctttaattgaaaccaatggggagacaggtgaaatcgtatgggataagggccgggacttcgcgacggtgagaaaagttttgtccatgccccaagtcaacatagtaaagaaaactgaggtgcagaccggagggttttcaaaggaatcgattcttccaaaaaggaatagtgataagctcatcgctcgtaaaaaggactgggacccgaaaaagtacggtggcttcgatagccctacagttgcctattctgtcctagtagtggcaaaagttgagaagggaaaatccaagaaactgaagtcagtcaaagaattattggggataacgattatggagcgctcgtcttttgaaaagaaccccatcgacttccttgaggcgaaaggttacaaggaagtaaaaaaggatctcataattaaactaccaaagtatagtctgtttgagttagaaaatggccgaaaacggatgttggctagcgccggagagcttcaaaaggggaacgaactcgcactaccgtctaaatacgtgaatttcctgtatttagcgtcccattacgagaagttgaaaggttcacctgaagataacgaacagaagcaactttttgttgagcagcacaaacattatctcgacgaaatcatagagcaaatttcggaattcagtaagagagtcatcctagctgatgccaatctggacaaagtattaagcgcatacaacaagcacagggataaacccatacgtgagcaggcggaaaatattatccatttgtttactcttaccaacctcggcgctccagccgcattcaagtattttgacacaacgatagatcgcaaacgatacacttctaccaaggaggtgctagacgcgacactgattcaccaatccatcacgggattatatgaaactcggatagatttgtcacagcttgggggtgacaactcaaagaaaaggtcactggaggacaacgaaacggaaatcaaagtctccagagacacctggaacactaagaacatgcggtccctggaaccgccacgaagcaagaaacggatacat

SEQ ID NO: 218 - DNA, 5157 bp, Artificial Sequence
  chemically synthesized
atgcccaaaaagaagaggaaagtcagctcttttttggacggtattgacaaagctcaggacgaacatgaaaagtaccactctaactggagagctatggcctccgattttaatcttccgccggtggtagcgaaagaaatcgttgccagttgcgacaaatgccaattgaagggagaagccatgcatggtcaagtggattgttcccccggaatatggcaactcgattgcacgcatctggaaggcaaggtcatcctcgtagcggtacatgttgcttctggatatattgaggccgaggttataccggcagaaacgggccaagaaacagcgtactttctcctgaagcttgcgggacgctggcctgtgaaaacgattcataccaacaacggttctaactttaccggagcaacagtacgggccgcatgctggtgggccggtataaagcaggaatttgggattccatacaatccgcaaagtcaaggtgtcgtcgagtctatgaataaggaactcaaaaagataattggtcaggttagagatcaagccgaacatctcaagacggcggtccaaatggcagtttttattcacaactttaagaggaaaggtgggattggtggctattcagcaggggagcgaatagtggacataatagcaaccgacatacagactaaggagttgcaaaagcagatcacaaagattcaaaattttcgggtttattaccgcgatagccggaatccgctttggaaaggtcctgcgaaacttttgtggaagggcgagggagctgtcgtcattcaggataacagcgacatcaaggtcgttccgcggcgcaaggcgaaaatcatacgggactatggtaaacaaatggccggggatgactgcgttgcgtcccggcaagacgaggatgggggcgggggaagcggcggtggaggtagtggagggggaggatcagataaaaagtattctattggtttagccatcggcactaattccgttggatgggctgtcataaccgatgaatacaaagtaccttcaaagaaatttaaggtgttggggaacacagaccgtcattcgattaaaaagaatcttatcggtgccctcctattcgatagtggcgaaacggcagaggcgactcgcctgaaacgaaccgctcggagaaggtatacacgtcgcaagaaccgaatatgttacttacaagaaatttttagcaatgagatggccaaagttgacgattctttctttcaccgtttggaagagtccttccttgtcgaagaggacaagaaacatgaacggcaccccatctttggaaacatagtagatgaggtggcatatcatgaaaagtacccaacgatttatcacctcagaaaaaagctagttgactcaactgataaagcggacctgaggttaatctacttggctcttgcccatatgataaagttccgtgggcactttctcattgagggtgatctaaatccggacaactcggatgtcgacaaactgttcatccagttagtacaaacctataatcagttgtttgaagagaaccctataaatgcaagtggcgtggatgcgaaggctattcttagcgcccgcctctctaaatcccgacggctagaaaacctgatcgcacaattacccggagagaagaaaaatgggttgttcggtaaccttatagcgctctcactaggcctgacaccaaattttaagtcgaacttcgacttagctgaagatgccaaattgcagcttagtaaggacacgtacgatgacgatctcgacaatctactggcacaaattggagatcagtatgcggacttatttttggctgccaaaaaccttagcgatgcaatcctcctatctgacatactgagagttaatactgagattaccaaggcgccgttatccgcttcaatgatcaaaaggtacgatgaacatcaccaagacttgacacttctcaaggccctagtccgtcagcaactgcctgagaaatataaggaaatattctttgatcagtcgaaaaacgggtacgcaggttatattgacggcggagcgagtcaagaggaattctacaagtttatcaaacccatattagagaagatggatgggacggaagagttgcttgtaaaactcaatcgcgaagatctactgcgaaagcagcggactttcgacaacggtagcattccacatcaaatccacttaggcgaattgcatgctatacttagaaggcaggaggatttttatccgttcctcaaagacaatcgtgaaaagattgagaaaatcctaacctttcgcataccttactatgtgggacccctggcccgagggaactctcggttcgcatggatgacaagaaagtccgaagaaacgattactccatggaattttgaggaagttgtcgataaaggtgcgtcagctcaatcgttcatcgagaggatgaccaactttgacaagaatttaccgaacgaaaaagtattgcctaagcacagtttactttacgagtatttcacagtgtacaatgaactcacgaaagttaagtatgtcactgagggcatgcgtaaacccgcctttctaagcggagaacagaagaaagcaatagtagatctgttattcaagaccaaccgcaaagtgacagttaagcaattgaaagaggactactttaagaaaattgaatgcttcgattctgtcgagatctccggggtagaagatcgatttaatgcgtcacttggtacgtatcatgacctcctaaagataattaaagataaggacttcctggataacgaagagaatgaagatatcttagaagatatagtgttgactcttaccctctttgaagatcgggaaatgattgaggaaagactaaaaacatacgctcacctgttcgacgataaggttatgaaacagttaaagaggcgtcgctatacgggctggggacgattgtcgcggaaacttatcaacgggataagagacaagcaaagtggtaaaactattctcgattttctaaagagcgacggcttcgccaataggaactttatgcagctgatccatgatgactctttaaccttcaaagaggatatacaaaaggcacaggtttccggacaaggggactcattgcacgaacatattgcgaatcttgctggttcgccagccatcaaaaagggcatactccagacagtcaaagtagtggatgagctagttaaggtcatgggacgtcacaaaccggaaaacattgtaatcgagatggcacgcgaaaatcaaacgactcagaaggggcaaaaaaacagtcgagagcggatgaagagaatagaagagggtattaaagaactgggcagccagatcttaaaggagcatcctgtggaaaatacccaattgcagaacgagaaactttacctctattacctacaaaatggaagggacatgtatgttgatcaggaactggacataaaccgtttatctgattacgacgtcgatgccattgtaccccaatcctttttgaaggacgattcaatcgacaataaagtgcttacacgctcggataagaaccgagggaaaagtgacaatgttccaagcgaggaagtcgtaaagaaaatgaagaactattggcggcagctcctaaatgcgaaactgataacgcaaagaaagttcgataacttaactaaagctgagaggggtggcttgtctgaacttgacaaggccggatttattaaacgtcagctcgtggaaacccgccaaatcacaaagcatgttgcacagatactagattcccgaatgaatacgaaatacgacgagaacgataagctgattcgggaagtcaaagtaatcactttaaagtcaaaattggtgtcggacttcagaaaggattttcaattctataaagttagggagataaataactaccaccatgcgcacgacgcttatcttaatgccgtcgtagggaccgcactcattaagaaatacccgaagctagaaagtgagtttgtgtatggtgattacaaagtttatgacgtccgtaagatgatcgcgaaaagcgaacaggagataggcaaggctacagccaaatacttcttttattctaacattatgaatttctttaagacggaaatcactctggcaaacggagagatacgcaaacgacctttaattgaaaccaatggggagacaggtgaaatcgtatgggataagggccgggacttcgcgacggtgagaaaagttttgtccatgccccaagtcaacatagtaaagaaaactgaggtgcagaccggagggttttcaaaggaatcgattcttccaaaaaggaatagtgataagctcatcgctcgtaaaaaggactgggacccgaaaaagtacggtggcttcgatagccctacagttgcctattctgtcctagtagtggcaaaagttgagaagggaaaatccaagaaactgaagtcagtcaaagaattattggggataacgattatggagcgctcgtcttttgaaaagaaccccatcgacttccttgaggcgaaaggttacaaggaagtaaaaaaggatctcataattaaactaccaaagtatagtctgtttgagttagaaaatggccgaaaacggatgttggctagcgccggagagcttcaaaaggggaacgaactcgcactaccgtctaaatacgtgaatttcctgtatttagcgtcccattacgagaagttgaaaggttcacctgaagataacgaacagaagcaactttttgttgagcagcacaaacattatctcgacgaaatcatagagcaaatttcggaattcagtaagagagtcatcctagctgatgccaatctggacaaagtattaagcgcatacaacaagcacagggataaacccatacgtgagcaggcggaaaatattatccatttgtttactcttaccaacctcggcgctccagccgcattcaagtattttgacacaacgatagatcgcaaacgatacacttctaccaaggaggtgctagacgcgacactgattcaccaatccatcacgggattatatgaaactcggatagatttgtcacagcttgggggtgacaactcaaagaaaaggtcactggaggacaacgaaacggaaatcaaagtctccagagacacctggaacactaagaacatgcggtccctggaaccgccacgaagcaagaaacggatacat

SEQ ID NO: 219 - DNA, 4959 bp, Artificial Sequence
  chemically synthesized
atgcccaaaaagaagaggaaagtcagctcttttttggacggtattgacaaagctcaggacgaacatgaaaagtaccactctaactggagagctatggcctccgattttaatcttccgccggtggtagcgaaagaaatcgttgccagttgcgacaaatgccaattgaagggagaagccatgcatggtcaagtggattgttcccccggaatatggcaactcgattgcacgcatctggaaggcaaggtcatcctcgtagcggtacatgttgcttctggatatattgaggccgaggttataccggcagaaacgggccaagaaacagcgtactttctcctgaagcttgcgggacgctggcctgtgaaaacgattcataccaacaacggttctaactttaccggagcaacagtacgggccgcatgctggtgggccggtataaagcaggaatttgggattccatacaatccgcaaagtcaaggtgtcgtcgagtctatgaataaggaactcaaaaagataattggtcaggttagagatcaagccgaacatctcaagacggcggtccaaatggcagtttttattcacaactttaagaggaaaggtgggattggtggctattcagcaggggagcgaatagtggacataatagcaaccgacatacagactaaggagttgcaaaagcagatcacaaagattcaaaatgggggcgggggaagcggcggtggaggtagtggagggggaggatcagataaaaagtattctattggtttagccatcggcactaattccgttggatgggctgtcataaccgatgaatacaaagtaccttcaaagaaatttaaggtgttggggaacacagaccgtcattcgattaaaaagaatcttatcggtgccctcctattcgatagtggcgaaacggcagaggcgactcgcctgaaacgaaccgctcggagaaggtatacacgtcgcaagaaccgaatatgttacttacaagaaatttttagcaatgagatggccaaagttgacgattctttctttcaccgtttggaagagtccttccttgtcgaagaggacaagaaacatgaacggcaccccatctttggaaacatagtagatgaggtggcatatcatgaaaagtacccaacgatttatcacctcagaaaaaagctagttgactcaactgataaagcggacctgaggttaatctacttggctcttgcccatatgataaagttccgtgggcactttctcattgagggtgatctaaatccggacaactcggatgtcgacaaactgttcatccagttagtacaaacctataatcagttgtttgaagagaaccctataaatgcaagtggcgtggatgcgaaggctattcttagcgcccgcctctctaaatcccgacggctagaaaacctgatcgcacaattacccggagagaagaaaaatgggttgttcggtaaccttatagcgctctcactaggcctgacaccaaattttaagtcgaacttcgacttagctgaagatgccaaattgcagcttagtaaggacacgtacgatgacgatctcgacaatctactggcacaaattggagatcagtatgcggacttatttttggctgccaaaaaccttagcgatgcaatcctcctatctgacatactgagagttaatactgagattaccaaggcgccgttatccgcttcaatgatcaaaaggtacgatgaacatcaccaagacttgacacttctcaaggccctagtccgtcagcaactgcctgagaaatataaggaaatattctttgatcagtcgaaaaacgggtacgcaggttatattgacggcggagcgagtcaagaggaattctacaagtttatcaaacccatattagagaagatggatgggacggaagagttgcttgtaaaactcaatcgcgaagatctactgcgaaagcagcggactttcgacaacggtagcattccacatcaaatccacttaggcgaattgcatgctatacttagaaggcaggaggatttttatccgttcctcaaagacaatcgtgaaaagattgagaaaatcctaacctttcgcataccttactatgtgggacccctggcccgagggaactctcggttcgcatggatgacaagaaagtccgaagaaacgattactccatggaattttgaggaagttgtcgataaaggtgcgtcagctcaatcgttcatcgagaggatgaccaactttgacaagaatttaccgaacgaaaaagtattgcctaagcacagtttactttacgagtatttcacagtgtacaatgaactcacgaaagttaagtatgtcactgagggcatgcgtaaacccgcctttctaagcggagaacagaagaaagcaatagtagatctgttattcaagaccaaccgcaaagtgacagttaagcaattgaaagaggactactttaagaaaattgaatgcttcgattctgtcgagatctccggggtagaagatcgatttaatgcgtcacttggtacgtatcatgacctcctaaagataattaaagataaggacttcctggataacgaagagaatgaagatatcttagaagatatagtgttgactcttaccctctttgaagatcgggaaatgattgaggaaagactaaaaacatacgctcacctgttcgacgataaggttatgaaacagttaaagaggcgtcgctatacgggctggggacgattgtcgcggaaacttatcaacgggataagagacaagcaaagtggtaaaactattctcgattttctaaagagcgacggcttcgccaataggaactttatgcagctgatccatgatgactctttaaccttcaaagaggatatacaaaaggcacaggtttccggacaaggggactcattgcacgaacatattgcgaatcttgctggttcgccagccatcaaaaagggcatactccagacagtcaaagtagtggatgagctagttaaggtcatgggacgtcacaaaccggaaaacattgtaatcgagatggcacgcgaaaatcaaacgactcagaaggggcaaaaaaacagtcgagagcggatgaagagaatagaagagggtattaaagaactgggcagccagatcttaaaggagcatcctgtggaaaatacccaattgcagaacgagaaactttacctctattacctacaaaatggaagggacatgtatgttgatcaggaactggacataaaccgtttatctgattacgacgtcgatgccattgtaccccaatcctttttgaaggacgattcaatcgacaataaagtgcttacacgctcggataagaaccgagggaaaagtgacaatgttccaagcgaggaagtcgtaaagaaaatgaagaactattggcggcagctcctaaatgcgaaactgataacgcaaagaaagttcgataacttaactaaagctgagaggggtggcttgtctgaacttgacaaggccggatttattaaacgtcagctcgtggaaacccgccaaatcacaaagcatgttgcacagatactagattcccgaatgaatacgaaatacgacgagaacgataagctgattcgggaagtcaaagtaatcactttaaagtcaaaattggtgtcggacttcagaaaggattttcaattctataaagttagggagataaataactaccaccatgcgcacgacgcttatcttaatgccgtcgtagggaccgcactcattaagaaatacccgaagctagaaagtgagtttgtgtatggtgattacaaagtttatgacgtccgtaagatgatcgcgaaaagcgaacaggagataggcaaggctacagccaaatacttcttttattctaacattatgaatttctttaagacggaaatcactctggcaaacggagagatacgcaaacgacctttaattgaaaccaatggggagacaggtgaaatcgtatgggataagggccgggacttcgcgacggtgagaaaagttttgtccatgccccaagtcaacatagtaaagaaaactgaggtgcagaccggagggttttcaaaggaatcgattcttccaaaaaggaatagtgataagctcatcgctcgtaaaaaggactgggacccgaaaaagtacggtggcttcgatagccctacagttgcctattctgtcctagtagtggcaaaagttgagaagggaaaatccaagaaactgaagtcagtcaaagaattattggggataacgattatggagcgctcgtcttttgaaaagaaccccatcgacttccttgaggcgaaaggttacaaggaagtaaaaaaggatctcataattaaactaccaaagtatagtctgtttgagttagaaaatggccgaaaacggatgttggctagcgccggagagcttcaaaaggggaacgaactcgcactaccgtctaaatacgtgaatttcctgtatttagcgtcccattacgagaagttgaaaggttcacctgaagataacgaacagaagcaactttttgttgagcagcacaaacattatctcgacgaaatcatagagcaaatttcggaattcagtaagagagtcatcctagctgatgccaatctggacaaagtattaagcgcatacaacaagcacagggataaacccatacgtgagcaggcggaaaatattatccatttgtttactcttaccaacctcggcgctccagccgcattcaagtattttgacacaacgatagatcgcaaacgatacacttctaccaaggaggtgctagacgcgacactgattcaccaatccatcacgggattatatgaaactcggatagatttgtcacagcttgggggtgacaactcaaagaaaaggtcactggaggacaacgaaacggaaatcaaagtctccagagacacctggaacactaagaacatgcggtccctggaaccgccacgaagcaagaaacggatacat

SEQ ID NO: 220 - DNA, 5157 bp, Artificial Sequence
  chemically synthesized
atgcccaaaaagaagaggaaagtcagctcttttttggacggtattgacaaagctcaggacgaacatgaaaagtaccactctaactggagagctatggcctccgattttaatcttccgccggtggtagcgaaagaaatcgttgccagttgcgacaaatgccaattgaagggagaagccatgcatggtcaagtggattgttcccccggaatatggcaactcgattgcacgcatctggaaggcaaggtcatcctcgtagcggtacatgttgcttctggatatattgaggccgaggttataccggcagaaacgggccaagaaacagcgtactttctcctgaagcttgcgggacgctggcctgtgaaaacgattcataccgacaacggttctaactttaccggagcaacagtacgggccgcatgctggtgggccggtataaagcaggaatttgggattccatacaatccgcaaagtcaaggtgtcgtcgagtctatgaataaggaactcaaaaagataattggtcaggttagagatcaagccgaacatctcaagacggcggtccaaatggcagtttttattcacaacaagaagaggaaaggtgggattggtggctattcagcaggggagcgaatagtggacataatagcaaccgacatacagactaaggagttgcaaaagcagatcacaaagattcaaaattttcgggtttattaccgcgatagccggaatccgctttggaaaggtcctgcgaaacttttgtggaagggcgagggagctgtcgtcattcaggataacagcgacatcaaggtcgttccgcggcgcaaggcgaaaatcatacgggactatggtaaacaaatggccggggatgacagcgttgcgtcccggcaagacgaggatgggggcgggggaagcggcggtggaggtagtggagggggaggatcagataaaaagtattctattggtttagccatcggcactaattccgttggatgggctgtcataaccgatgaatacaaagtaccttcaaagaaatttaaggtgttggggaacacagaccgtcattcgattaaaaagaatcttatcggtgccctcctattcgatagtggcgaaacggcagaggcgactcgcctgaaacgaaccgctcggagaaggtatacacgtcgcaagaaccgaatatgttacttacaagaaatttttagcaatgagatggccaaagttgacgattctttctttcaccgtttggaagagtccttccttgtcgaagaggacaagaaacatgaacggcaccccatctttggaaacatagtagatgaggtggcatatcatgaaaagtacccaacgatttatcacctcagaaaaaagctagttgactcaactgataaagcggacctgaggttaatctacttggctcttgcccatatgataaagttccgtgggcactttctcattgagggtgatctaaatccggacaactcggatgtcgacaaactgttcatccagttagtacaaacctataatcagttgtttgaagagaaccctataaatgcaagtggcgtggatgcgaaggctattcttagcgcccgcctctctaaatcccgacggctagaaaacctgatcgcacaattacccggagagaagaaaaatgggttgttcggtaaccttatagcgctctcactaggcctgacaccaaattttaagtcgaacttcgacttagctgaagatgccaaattgcagcttagtaaggacacgtacgatgacgatctcgacaatctactggcacaaattggagatcagtatgcggacttatttttggctgccaaaaaccttagcgatgcaatcctcctatctgacatactgagagttaatactgagattaccaaggcgccgttatccgcttcaatgatcaaaaggtacgatgaacatcaccaagacttgacacttctcaaggccctagtccgtcagcaactgcctgagaaatataaggaaatattctttgatcagtcgaaaaacgggtacgcaggttatattgacggcggagcgagtcaagaggaattctacaagtttatcaaacccatattagagaagatggatgggacggaagagttgcttgtaaaactcaatcgcgaagatctactgcgaaagcagcggactttcgacaacggtagcattccacatcaaatccacttaggcgaattgcatgctatacttagaaggcaggaggatttttatccgttcctcaaagacaatcgtgaaaagattgagaaaatcctaacctttcgcataccttactatgtgggacccctggcccgagggaactctcggttcgcatggatgacaagaaagtccgaagaaacgattactccatggaattttgaggaagttgtcgataaaggtgcgtcagctcaatcgttcatcgagaggatgaccaactttgacaagaatttaccgaacgaaaaagtattgcctaagcacagtttactttacgagtatttcacagtgtacaatgaactcacgaaagttaagtatgtcactgagggcatgcgtaaacccgcctttctaagcggagaacagaagaaagcaatagtagatctgttattcaagaccaaccgcaaagtgacagttaagcaattgaaagaggactactttaagaaaattgaatgcttcgattctgtcgagatctccggggtagaagatcgatttaatgcgtcacttggtacgtatcatgacctcctaaagataattaaagataaggacttcctggataacgaagagaatgaagatatcttagaagatatagtgttgactcttaccctctttgaagatcgggaaatgattgaggaaagactaaaaacatacgctcacctgttcgacgataaggttatgaaacagttaaagaggcgtcgctatacgggctggggacgattgtcgcggaaacttatcaacgggataagagacaagcaaagtggtaaaactattctcgattttctaaagagcgacggcttcgccaataggaactttatgcagctgatccatgatgactctttaaccttcaaagaggatatacaaaaggcacaggtttccggacaaggggactcattgcacgaacatattgcgaatcttgctggttcgccagccatcaaaaagggcatactccagacagtcaaagtagtggatgagctagttaaggtcatgggacgtcacaaaccggaaaacattgtaatcgagatggcacgcgaaaatcaaacgactcagaaggggcaaaaaaacagtcgagagcggatgaagagaatagaagagggtattaaagaactgggcagccagatcttaaaggagcatcctgtggaaaatacccaattgcagaacgagaaactttacctctattacctacaaaatggaagggacatgtatgttgatcaggaactggacataaaccgtttatctgattacgacgtcgatgccattgtaccccaatcctttttgaaggacgattcaatcgacaataaagtgcttacacgctcggataagaaccgagggaaaagtgacaatgttccaagcgaggaagtcgtaaagaaaatgaagaactattggcggcagctcctaaatgcgaaactgataacgcaaagaaagttcgataacttaactaaagctgagaggggtggcttgtctgaacttgacaaggccggatttattaaacgtcagctcgtggaaacccgccaaatcacaaagcatgttgcacagatactagattcccgaatgaatacgaaatacgacgagaacgataagctgattcgggaagtcaaagtaatcactttaaagtcaaaattggtgtcggacttcagaaaggattttcaattctataaagttagggagataaataactaccaccatgcgcacgacgcttatcttaatgccgtcgtagggaccgcactcattaagaaatacccgaagctagaaagtgagtttgtgtatggtgattacaaagtttatgacgtccgtaagatgatcgcgaaaagcgaacaggagataggcaaggctacagccaaatacttcttttattctaacattatgaatttctttaagacggaaatcactctggcaaacggagagatacgcaaacgacctttaattgaaaccaatggggagacaggtgaaatcgtatgggataagggccgggacttcgcgacggtgagaaaagttttgtccatgccccaagtcaacatagtaaagaaaactgaggtgcagaccggagggttttcaaaggaatcgattcttccaaaaaggaatagtgataagctcatcgctcgtaaaaaggactgggacccgaaaaagtacggtggcttcgatagccctacagttgcctattctgtcctagtagtggcaaaagttgagaagggaaaatccaagaaactgaagtcagtcaaagaattattggggataacgattatggagcgctcgtcttttgaaaagaaccccatcgacttccttgaggcgaaaggttacaaggaagtaaaaaaggatctcataattaaactaccaaagtatagtctgtttgagttagaaaatggccgaaaacggatgttggctagcgccggagagcttcaaaaggggaacgaactcgcactaccgtctaaatacgtgaatttcctgtatttagcgtcccattacgagaagttgaaaggttcacctgaagataacgaacagaagcaactttttgttgagcagcacaaacattatctcgacgaaatcatagagcaaatttcggaattcagtaagagagtcatcctagctgatgccaatctggacaaagtattaagcgcatacaacaagcacagggataaacccatacgtgagcaggcggaaaatattatccatttgtttactcttaccaacctcggcgctccagccgcattcaagtattttgacacaacgatagatcgcaaacgatacacttctaccaaggaggtgctagacgcgacactgattcaccaatccatcacgggattatatgaaactcggatagatttgtcacagcttgggggtgacaactcaaagaaaaggtcactggaggacaacgaaacggaaatcaaagtctccagagacacctggaacactaagaacatgcggtccctggaaccgccacgaagcaagaaacggatacat

SEQ ID NO: 221 - DNA, 5157 bp, Artificial Sequence
  chemically synthesized
atgcccaaaaagaagaggaaagtcagctcttttttggacggtattgacaaagctcaggacgaacatgaaaagtaccactctaactggagagctatggcctccgattttaatcttccgccggtggtagcgaaagaaatcgttgccagttgcgacaaatgccaattgaagggagaagccatgcatggtcaagtggattgttcccccggaatatggcaactcgattgcacgcatctggaaggcaaggtcatcctcgtagcggtacatgttgcttctggatatattgaggccgaggttataccggcagaaacgggccaagaaacagcgtactttctcctgaagcttgcgggacgctggcctgtgaaaacgattcataccgacaacggttctaactttaccggagcaacagtacgggccgcatgctggtgggccggtataaagcaggaatttgggattccatacaatccgcaaagtcaaggtgtcgtcgagtctatgaataaggaactcaaaaagataattggtcaggttagagatcaagccgaacatctcaagacggcggtccaaatggcagtttttattcacaactttaagaggaaaggtgggattggtggctattcagcaggggagcgaatagtggacataatagcaaccgacatacagactaaggagttgcaaaagcagatcacaaagattcaaaattttcgggtttattaccgcgatagccggaatccgctttggaaaggtcctgcgaaacttttgtggaagggcgagggagctgtcgtcattcaggataacagcgacatcaaggtcgttccgcggcgcaaggcgaaaatcatacgggactatggtaaacaaatggccggggatgacagcgttgcgtcccggcaagacgaggatgggggcgggggaagcggcggtggaggtagtggagggggaggatcagataaaaagtattctattggtttagccatcggcactaattccgttggatgggctgtcataaccgatgaatacaaagtaccttcaaagaaatttaaggtgttggggaacacagaccgtcattcgattaaaaagaatcttatcggtgccctcctattcgatagtggcgaaacggcagaggcgactcgcctgaaacgaaccgctcggagaaggtatacacgtcgcaagaaccgaatatgttacttacaagaaatttttagcaatgagatggccaaagttgacgattctttctttcaccgtttggaagagtccttccttgtcgaagaggacaagaaacatgaacggcaccccatctttggaaacatagtagatgaggtggcatatcatgaaaagtacccaacgatttatcacctcagaaaaaagctagttgactcaactgataaagcggacctgaggttaatctacttggctcttgcccatatgataaagttccgtgggcactttctcattgagggtgatctaaatccggacaactcggatgtcgacaaactgttcatccagttagtacaaacctataatcagttgtttgaagagaaccctataaatgcaagtggcgtggatgcgaaggctattcttagcgcccgcctctctaaatcccgacggctagaaaacctgatcgcacaattacccggagagaagaaaaatgggttgttcggtaaccttatagcgctctcactaggcctgacaccaaattttaagtcgaacttcgacttagctgaagatgccaaattgcagcttagtaaggacacgtacgatgacgatctcgacaatctactggcacaaattggagatcagtatgcggacttatttttggctgccaaaaaccttagcgatgcaatcctcctatctgacatactgagagttaatactgagattaccaaggcgccgttatccgcttcaatgatcaaaaggtacgatgaacatcaccaagacttgacacttctcaaggccctagtccgtcagcaactgcctgagaaatataaggaaatattctttgatcagtcgaaaaacgggtacgcaggttatattgacggcggagcgagtcaagaggaattctacaagtttatcaaacccatattagagaagatggatgggacggaagagttgcttgtaaaactcaatcgcgaagatctactgcgaaagcagcggactttcgacaacggtagcattccacatcaaatccacttaggcgaattgcatgctatacttagaaggcaggaggatttttatccgttcctcaaagacaatcgtgaaaagattgagaaaatcctaacctttcgcataccttactatgtgggacccctggcccgagggaactctcggttcgcatggatgacaagaaagtccgaagaaacgattactccatggaattttgaggaagttgtcgataaaggtgcgtcagctcaatcgttcatcgagaggatgaccaactttgacaagaatttaccgaacgaaaaagtattgcctaagcacagtttactttacgagtatttcacagtgtacaatgaactcacgaaagttaagtatgtcactgagggcatgcgtaaacccgcctttctaagcggagaacagaagaaagcaatagtagatctgttattcaagaccaaccgcaaagtgacagttaagcaattgaaagaggactactttaagaaaattgaatgcttcgattctgtcgagatctccggggtagaagatcgatttaatgcgtcacttggtacgtatcatgacctcctaaagataattaaagataaggacttcctggataacgaagagaatgaagatatcttagaagatatagtgttgactcttaccctctttgaagatcgggaaatgattgaggaaagactaaaaacatacgctcacctgttcgacgataaggttatgaaacagttaaagaggcgtcgctatacgggctggggacgattgtcgcggaaacttatcaacgggataagagacaagcaaagtggtaaaactattctcgattttctaaagagcgacggcttcgccaataggaactttatgcagctgatccatgatgactctttaaccttcaaagaggatatacaaaaggcacaggtttccggacaaggggactcattgcacgaacatattgcgaatcttgctggttcgccagccatcaaaaagggcatactccagacagtcaaagtagtggatgagctagttaaggtcatgggacgtcacaaaccggaaaacattgtaatcgagatggcacgcgaaaatcaaacgactcagaaggggcaaaaaaacagtcgagagcggatgaagagaatagaagagggtattaaagaactgggcagccagatcttaaaggagcatcctgtggaaaatacccaattgcagaacgagaaactttacctctattacctacaaaatggaagggacatgtatgttgatcaggaactggacataaaccgtttatctgattacgacgtcgatgccattgtaccccaatcctttttgaaggacgattcaatcgacaataaagtgcttacacgctcggataagaaccgagggaaaagtgacaatgttccaagcgaggaagtcgtaaagaaaatgaagaactattggcggcagctcctaaatgcgaaactgataacgcaaagaaagttcgataacttaactaaagctgagaggggtggcttgtctgaacttgacaaggccggatttattaaacgtcagctcgtggaaacccgccaaatcacaaagcatgttgcacagatactagattcccgaatgaatacgaaatacgacgagaacgataagctgattcgggaagtcaaagtaatcactttaaagtcaaaattggtgtcggacttcagaaaggattttcaattctataaagttagggagataaataactaccaccatgcgcacgacgcttatcttaatgccgtcgtagggaccgcactcattaagaaatacccgaagctagaaagtgagtttgtgtatggtgattacaaagtttatgacgtccgtaagatgatcgcgaaaagcgaacaggagataggcaaggctacagccaaatacttcttttattctaacattatgaatttctttaagacggaaatcactctggcaaacggagagatacgcaaacgacctttaattgaaaccaatggggagacaggtgaaatcgtatgggataagggccgggacttcgcgacggtgagaaaagttttgtccatgccccaagtcaacatagtaaagaaaactgaggtgcagaccggagggttttcaaaggaatcgattcttccaaaaaggaatagtgataagctcatcgctcgtaaaaaggactgggacccgaaaaagtacggtggcttcgatagccctacagttgcctattctgtcctagtagtggcaaaagttgagaagggaaaatccaagaaactgaagtcagtcaaagaattattggggataacgattatggagcgctcgtcttttgaaaagaaccccatcgacttccttgaggcgaaaggttacaaggaagtaaaaaaggatctcataattaaactaccaaagtatagtctgtttgagttagaaaatggccgaaaacggatgttggctagcgccggagagcttcaaaaggggaacgaactcgcactaccgtctaaatacgtgaatttcctgtatttagcgtcccattacgagaagttgaaaggttcacctgaagataacgaacagaagcaactttttgttgagcagcacaaacattatctcgacgaaatcatagagcaaatttcggaattcagtaagagagtcatcctagctgatgccaatctggacaaagtattaagcgcatacaacaagcacagggataaacccatacgtgagcaggcggaaaatattatccatttgtttactcttaccaacctcggcgctccagccgcattcaagtattttgacacaacgatagatcgcaaacgatacacttctaccaaggaggtgctagacgcgacactgattcaccaatccatcacgggattatatgaaactcggatagatttgtcacagcttgggggtgacaactcaaagaaaaggtcactggaggacaacgaaacggaaatcaaagtctccagagacacctggaacactaagaacatgcggtccctggaaccgccacgaagcaagaaacggatacat

SEQ ID NO: 222 - DNA, 5157 bp, Artificial Sequence
  chemically synthesized
atgcccaaaaagaagaggaaagtcagctcttttttggacggtattgacaaagctcaggacgaacatgaaaagtaccactctaactggagagctatggcctccgattttaatcttccgccggtggtagcgaaagaaatcgttgccagttgcgacaaatgccaattgaagggagaagccatgcatggtcaagtggattgttcccccggaatatggcaactcgattgcacgcatctggaaggcaaggtcatcctcgtagcggtacatgttgcttctggatatattgaggccgaggttataccggcagaaacgggccaagaaacagcgtactttctcctgaagcttgcgggacgctggcctgtgaaaacgattcataccgacaacggttctaactttaccggagcaacagtacgggccgcatgctggtgggccggtataaagcaggaatttgggattccatacaatccgcaaagtcaaggtgtcgtcgagtctatgaataaggaactcaaaaagataattggtcaggttagagatcaagccgaacatctcaagacggcggtccaaatggcagtttttattcacaacaagaagaggaaaggtgggattggtggctattcagcaggggagcgaatagtggacataatagcaaccgacatacagactaaggagttgcaaaagcagatcacaaagattcaaaattttcgggtttattaccgcgatagccggaatccgctttggaaaggtcctgcgaaacttttgtggaagggcgagggagctgtcgtcattcaggataacagcgacatcaaggtcgttccgcggcgcaaggcgaaaatcatacgggactatggtaaacaaatggccggggatgactgcgttgcgtcccggcaagacgaggatgggggcgggggaagcggcggtggaggtagtggagggggaggatcagataaaaagtattctattggtttagccatcggcactaattccgttggatgggctgtcataaccgatgaatacaaagtaccttcaaagaaatttaaggtgttggggaacacagaccgtcattcgattaaaaagaatcttatcggtgccctcctattcgatagtggcgaaacggcagaggcgactcgcctgaaacgaaccgctcggagaaggtatacacgtcgcaagaaccgaatatgttacttacaagaaatttttagcaatgagatggccaaagttgacgattctttctttcaccgtttggaagagtccttccttgtcgaagaggacaagaaacatgaacggcaccccatctttggaaacatagtagatgaggtggcatatcatgaaaagtacccaacgatttatcacctcagaaaaaagctagttgactcaactgataaagcggacctgaggttaatctacttggctcttgcccatatgataaagttccgtgggcactttctcattgagggtgatctaaatccggacaactcggatgtcgacaaactgttcatccagttagtacaaacctataatcagttgtttgaagagaaccctataaatgcaagtggcgtggatgcgaaggctattcttagcgcccgcctctctaaatcccgacggctagaaaacctgatcgcacaattacccggagagaagaaaaatgggttgttcggtaaccttatagcgctctcactaggcctgacaccaaattttaagtcgaacttcgacttagctgaagatgccaaattgcagcttagtaaggacacgtacgatgacgatctcgacaatctactggcacaaattggagatcagtatgcggacttatttttggctgccaaaaaccttagcgatgcaatcctcctatctgacatactgagagttaatactgagattaccaaggcgccgttatccgcttcaatgatcaaaaggtacgatgaacatcaccaagacttgacacttctcaaggccctagtccgtcagcaactgcctgagaaatataaggaaatattctttgatcagtcgaaaaacgggtacgcaggttatattgacggcggagcgagtcaagaggaattctacaagtttatcaaacccatattagagaagatggatgggacggaagagttgcttgtaaaactcaatcgcgaagatctactgcgaaagcagcggactttcgacaacggtagcattccacatcaaatccacttaggcgaattgcatgctatacttagaaggcaggaggatttttatccgttcctcaaagacaatcgtgaaaagattgagaaaatcctaacctttcgcataccttactatgtgggacccctggcccgagggaactctcggttcgcatggatgacaagaaagtccgaagaaacgattactccatggaattttgaggaagttgtcgataaaggtgcgtcagctcaatcgttcatcgagaggatgaccaactttgacaagaatttaccgaacgaaaaagtattgcctaagcacagtttactttacgagtatttcacagtgtacaatgaactcacgaaagttaagtatgtcactgagggcatgcgtaaacccgcctttctaagcggagaacagaagaaagcaatagtagatctgttattcaagaccaaccgcaaagtgacagttaagcaattgaaagaggactactttaagaaaattgaatgcttcgattctgtcgagatctccggggtagaagatcgatttaatgcgtcacttggtacgtatcatgacctcctaaagataattaaagataaggacttcctggataacgaagagaatgaagatatcttagaagatatagtgttgactcttaccctctttgaagatcgggaaatgattgaggaaagactaaaaacatacgctcacctgttcgacgataaggttatgaaacagttaaagaggcgtcgctatacgggctggggacgattgtcgcggaaacttatcaacgggataagagacaagcaaagtggtaaaactattctcgattttctaaagagcgacggcttcgccaataggaactttatgcagctgatccatgatgactctttaaccttcaaagaggatatacaaaaggcacaggtttccggacaaggggactcattgcacgaacatattgcgaatcttgctggttcgccagccatcaaaaagggcatactccagacagtcaaagtagtggatgagctagttaaggtcatgggacgtcacaaaccggaaaacattgtaatcgagatggcacgcgaaaatcaaacgactcagaaggggcaaaaaaacagtcgagagcggatgaagagaatagaagagggtattaaagaactgggcagccagatcttaaaggagcatcctgtggaaaatacccaattgcagaacgagaaactttacctctattacctacaaaatggaagggacatgtatgttgatcaggaactggacataaaccgtttatctgattacgacgtcgatgccattgtaccccaatcctttttgaaggacgattcaatcgacaataaagtgcttacacgctcggataagaaccgagggaaaagtgacaatgttccaagcgaggaagtcgtaaagaaaatgaagaactattggcggcagctcctaaatgcgaaactgataacgcaaagaaagttcgataacttaactaaagctgagaggggtggcttgtctgaacttgacaaggccggatttattaaacgtcagctcgtggaaacccgccaaatcacaaagcatgttgcacagatactagattcccgaatgaatacgaaatacgacgagaacgataagctgattcgggaagtcaaagtaatcactttaaagtcaaaattggtgtcggacttcagaaaggattttcaattctataaagttagggagataaataactaccaccatgcgcacgacgcttatcttaatgccgtcgtagggaccgcactcattaagaaatacccgaagctagaaagtgagtttgtgtatggtgattacaaagtttatgacgtccgtaagatgatcgcgaaaagcgaacaggagataggcaaggctacagccaaatacttcttttattctaacattatgaatttctttaagacggaaatcactctggcaaacggagagatacgcaaacgacctttaattgaaaccaatggggagacaggtgaaatcgtatgggataagggccgggacttcgcgacggtgagaaaagttttgtccatgccccaagtcaacatagtaaagaaaactgaggtgcagaccggagggttttcaaaggaatcgattcttccaaaaaggaatagtgataagctcatcgctcgtaaaaaggactgggacccgaaaaagtacggtggcttcgatagccctacagttgcctattctgtcctagtagtggcaaaagttgagaagggaaaatccaagaaactgaagtcagtcaaagaattattggggataacgattatggagcgctcgtcttttgaaaagaaccccatcgacttccttgaggcgaaaggttacaaggaagtaaaaaaggatctcataattaaactaccaaagtatagtctgtttgagttagaaaatggccgaaaacggatgttggctagcgccggagagcttcaaaaggggaacgaactcgcactaccgtctaaatacgtgaatttcctgtatttagcgtcccattacgagaagttgaaaggttcacctgaagataacgaacagaagcaactttttgttgagcagcacaaacattatctcgacgaaatcatagagcaaatttcggaattcagtaagagagtcatcctagctgatgccaatctggacaaagtattaagcgcatacaacaagcacagggataaacccatacgtgagcaggcggaaaatattatccatttgtttactcttaccaacctcggcgctccagccgcattcaagtattttgacacaacgatagatcgcaaacgatacacttctaccaaggaggtgctagacgcgacactgattcaccaatccatcacgggattatatgaaactcggatagatttgtcacagcttgggggtgacaactcaaagaaaaggtcactggaggacaacgaaacggaaatcaaagtctccagagacacctggaacactaagaacatgcggtccctggaaccgccacgaagcaagaaacggatacat

SEQ ID NO: 223 - DNA, 4959 bp, Artificial Sequence
  chemically synthesized
atgcccaaaaagaagaggaaagtcagctcttttttggacggtattgacaaagctcaggacgaacatgaaaagtaccactctaactggagagctatggcctccgattttaatcttccgccggtggtagcgaaagaaatcgttgccagttgcgacaaatgccaattgaagggagaagccatgcatggtcaagtggattgttcccccggaatatggcaactcgattgcacgcatctggaaggcaaggtcatcctcgtagcggtacatgttgcttctggatatattgaggccgaggttataccggcagaaacgggccaagaaacagcgtactttctcctgaagcttgcgggacgctggcctgtgaaaacgattcataccgacaacggttctaactttaccggagcaacagtacgggccgcatgctggtgggccggtataaagcaggaatttgggattccatacaatccgcaaagtcaaggtgtcgtcgagtctatgaataaggaactcaaaaagataattggtcaggttagagatcaagccgaacatctcaagacggcggtccaaatggcagtttttattcacaacaagaagaggaaaggtgggattggtggctattcagcaggggagcgaatagtggacataatagcaaccgacatacagactaaggagttgcaaaagcagatcacaaagattcaaaatgggggcgggggaagcggcggtggaggtagtggagggggaggatcagataaaaagtattctattggtttagccatcggcactaattccgttggatgggctgtcataaccgatgaatacaaagtaccttcaaagaaatttaaggtgttggggaacacagaccgtcattcgattaaaaagaatcttatcggtgccctcctattcgatagtggcgaaacggcagaggcgactcgcctgaaacgaaccgctcggagaaggtatacacgtcgcaagaaccgaatatgttacttacaagaaatttttagcaatgagatggccaaagttgacgattctttctttcaccgtttggaagagtccttccttgtcgaagaggacaagaaacatgaacggcaccccatctttggaaacatagtagatgaggtggcatatcatgaaaagtacccaacgatttatcacctcagaaaaaagctagttgactcaactgataaagcggacctgaggttaatctacttggctcttgcccatatgataaagttccgtgggcactttctcattgagggtgatctaaatccggacaactcggatgtcgacaaactgttcatccagttagtacaaacctataatcagttgtttgaagagaaccctataaatgcaagtggcgtggatgcgaaggctattcttagcgcccgcctctctaaatcccgacggctagaaaacctgatcgcacaattacccggagagaagaaaaatgggttgttcggtaaccttatagcgctctcactaggcctgacaccaaattttaagtcgaacttcgacttagctgaagatgccaaattgcagcttagtaaggacacgtacgatgacgatctcgacaatctactggcacaaattggagatcagtatgcggacttatttttggctgccaaaaaccttagcgatgcaatcctcctatctgacatactgagagttaatactgagattaccaaggcgccgttatccgcttcaatgatcaaaaggtacgatgaacatcaccaagacttgacacttctcaaggccctagtccgtcagcaactgcctgagaaatataaggaaatattctttgatcagtcgaaaaacgggtacgcaggttatattgacggcggagcgagtcaagaggaattctacaagtttatcaaacccatattagagaagatggatgggacggaagagttgcttgtaaaactcaatcgcgaagatctactgcgaaagcagcggactttcgacaacggtagcattccacatcaaatccacttaggcgaattgcatgctatacttagaaggcaggaggatttttatccgttcctcaaagacaatcgtgaaaagattgagaaaatcctaacctttcgcataccttactatgtgggacccctggcccgagggaactctcggttcgcatggatgacaagaaagtccgaagaaacgattactccatggaattttgaggaagttgtcgataaaggtgcgtcagctcaatcgttcatcgagaggatgaccaactttgacaagaatttaccgaacgaaaaagtattgcctaagcacagtttactttacgagtatttcacagtgtacaatgaactcacgaaagttaagtatgtcactgagggcatgcgtaaacccgcctttctaagcggagaacagaagaaagcaatagtagatctgttattcaagaccaaccgcaaagtgacagttaagcaattgaaagaggactactttaagaaaattgaatgcttcgattctgtcgagatctccggggtagaagatcgatttaatgcgtcacttggtacgtatcatgacctcctaaagataattaaagataaggacttcctggataacgaagagaatgaagatatcttagaagatatagtgttgactcttaccctctttgaagatcgggaaatgattgaggaaagactaaaaacatacgctcacctgttcgacgataaggttatgaaacagttaaagaggcgtcgctatacgggctggggacgattgtcgcggaaacttatcaacgggataagagacaagcaaagtggtaaaactattctcgattttctaaagagcgacggcttcgccaataggaactttatgcagctgatccatgatgactctttaaccttcaaagaggatatacaaaaggcacaggtttccggacaaggggactcattgcacgaacatattgcgaatcttgctggttcgccagccatcaaaaagggcatactccagacagtcaaagtagtggatgagctagttaaggtcatgggacgtcacaaaccggaaaacattgtaatcgagatggcacgcgaaaatcaaacgactcagaaggggcaaaaaaacagtcgagagcggatgaagagaatagaagagggtattaaagaactgggcagccagatcttaaaggagcatcctgtggaaaatacccaattgcagaacgagaaactttacctctattacctacaaaatggaagggacatgtatgttgatcaggaactggacataaaccgtttatctgattacgacgtcgatgccattgtaccccaatcctttttgaaggacgattcaatcgacaataaagtgcttacacgctcggataagaaccgagggaaaagtgacaatgttccaagcgaggaagtcgtaaagaaaatgaagaactattggcggcagctcctaaatgcgaaactgataacgcaaagaaagttcgataacttaactaaagctgagaggggtggcttgtctgaacttgacaaggccggatttattaaacgtcagctcgtggaaacccgccaaatcacaaagcatgttgcacagatactagattcccgaatgaatacgaaatacgacgagaacgataagctgattcgggaagtcaaagtaatcactttaaagtcaaaattggtgtcggacttcagaaaggattttcaattctataaagttagggagataaataactaccaccatgcgcacgacgcttatcttaatgccgtcgtagggaccgcactcattaagaaatacccgaagctagaaagtgagtttgtgtatggtgattacaaagtttatgacgtccgtaagatgatcgcgaaaagcgaacaggagataggcaaggctacagccaaatacttcttttattctaacattatgaatttctttaagacggaaatcactctggcaaacggagagatacgcaaacgacctttaattgaaaccaatggggagacaggtgaaatcgtatgggataagggccgggacttcgcgacggtgagaaaagttttgtccatgccccaagtcaacatagtaaagaaaactgaggtgcagaccggagggttttcaaaggaatcgattcttccaaaaaggaatagtgataagctcatcgctcgtaaaaaggactgggacccgaaaaagtacggtggcttcgatagccctacagttgcctattctgtcctagtagtggcaaaagttgagaagggaaaatccaagaaactgaagtcagtcaaagaattattggggataacgattatggagcgctcgtcttttgaaaagaaccccatcgacttccttgaggcgaaaggttacaaggaagtaaaaaaggatctcataattaaactaccaaagtatagtctgtttgagttagaaaatggccgaaaacggatgttggctagcgccggagagcttcaaaaggggaacgaactcgcactaccgtctaaatacgtgaatttcctgtatttagcgtcccattacgagaagttgaaaggttcacctgaagataacgaacagaagcaactttttgttgagcagcacaaacattatctcgacgaaatcatagagcaaatttcggaattcagtaagagagtcatcctagctgatgccaatctggacaaagtattaagcgcatacaacaagcacagggataaacccatacgtgagcaggcggaaaatattatccatttgtttactcttaccaacctcggcgctccagccgcattcaagtattttgacacaacgatagatcgcaaacgatacacttctaccaaggaggtgctagacgcgacactgattcaccaatccatcacgggattatatgaaactcggatagatttgtcacagcttgggggtgacaactcaaagaaaaggtcactggaggacaacgaaacggaaatcaaagtctccagagacacctggaacactaagaacatgcggtccctggaaccgccacgaagcaagaaacggatacat

SEQ ID NO: 224 - DNA, 5157 bp, Artificial Sequence
  chemically synthesized
atgcccaaaaagaagaggaaagtcagctcttttttggacggtattgacaaagctcaggacgaacatgaaaagtaccactctaactggagagctatggcctccgattttaatcttccgccggtggtagcgaaagaaatcgttgccagttgcgacaaatgccaattgaagggagaagccatgcatggtcaagtggattgttcccccggaatatggcaactcgattgcacgcatctggaaggcaaggtcatcctcgtagcggtacatgttgcttctggatatattgaggccgaggttataccggcagaaacgggccaagaagcggcgtactttctcctgaagcttgcgggacgctggcctgtgaaaacgattcataccgacaacggttctaactttaccggagcaacagtacgggccgcatgctggtgggccggtataaagcaggaatttgggattccacggaatccgcaaagtcaaggtgtcgtcgagtctatgaataaggaactcaaaaagataattggtcaggttagagatcaagccgaacatctcaagacggcggtccaaatggcagtttttattcacaactttaagaggaaaggtgggattggtggctattcagcaggggagcgaatagtggacataatagcaaccgacatacagactaaggagttgcaaaagcagatcacaaagattcaaaattttcgggtttattaccgcgatagccggaatccgctttggaaaggtcctgcgaaacttttgtggaagggcgagggagctgtcgtcattcaggataacagcgacatcaaggtcgttccgcggcgcaaggcgaaaatcatacgggactatggtaaacaaatggccggggatgactgcgttgcgtcccggcaagacgaggatgggggcgggggaagcggcggtggaggtagtggagggggaggatcagataaaaagtattctattggtttagccatcggcactaattccgttggatgggctgtcataaccgatgaatacaaagtaccttcaaagaaatttaaggtgttggggaacacagaccgtcattcgattaaaaagaatcttatcggtgccctcctattcgatagtggcgaaacggcagaggcgactcgcctgaaacgaaccgctcggagaaggtatacacgtcgcaagaaccgaatatgttacttacaagaaatttttagcaatgagatggccaaagttgacgattctttctttcaccgtttggaagagtccttccttgtcgaagaggacaagaaacatgaacggcaccccatctttggaaacatagtagatgaggtggcatatcatgaaaagtacccaacgatttatcacctcagaaaaaagctagttgactcaactgataaagcggacctgaggttaatctacttggctcttgcccatatgataaagttccgtgggcactttctcattgagggtgatctaaatccggacaactcggatgtcgacaaactgttcatccagttagtacaaacctataatcagttgtttgaagagaaccctataaatgcaagtggcgtggatgcgaaggctattcttagcgcccgcctctctaaatcccgacggctagaaaacctgatcgcacaattacccggagagaagaaaaatgggttgttcggtaaccttatagcgctctcactaggcctgacaccaaattttaagtcgaacttcgacttagctgaagatgccaaattgcagcttagtaaggacacgtacgatgacgatctcgacaatctactggcacaaattggagatcagtatgcggacttatttttggctgccaaaaaccttagcgatgcaatcctcctatctgacatactgagagttaatactgagattaccaaggcgccgttatccgcttcaatgatcaaaaggtacgatgaacatcaccaagacttgacacttctcaaggccctagtccgtcagcaactgcctgagaaatataaggaaatattctttgatcagtcgaaaaacgggtacgcaggttatattgacggcggagcgagtcaagaggaattctacaagtttatcaaacccatattagagaagatggatgggacggaagagttgcttgtaaaactcaatcgcgaagatctactgcgaaagcagcggactttcgacaacggtagcattccacatcaaatccacttaggcgaattgcatgctatacttagaaggcaggaggatttttatccgttcctcaaagacaatcgtgaaaagattgagaaaatcctaacctttcgcataccttactatgtgggacccctggcccgagggaactctcggttcgcatggatgacaagaaagtccgaagaaacgattactccatggaattttgaggaagttgtcgataaaggtgcgtcagctcaatcgttcatcgagaggatgaccaactttgacaagaatttaccgaacgaaaaagtattgcctaagcacagtttactttacgagtatttcacagtgtacaatgaactcacgaaagttaagtatgtcactgagggcatgcgtaaacccgcctttctaagcggagaacagaagaaagcaatagtagatctgttattcaagaccaaccgcaaagtgacagttaagcaattgaaagaggactactttaagaaaattgaatgcttcgattctgtcgagatctccggggtagaagatcgatttaatgcgtcacttggtacgtatcatgacctcctaaagataattaaagataaggacttcctggataacgaagagaatgaagatatcttagaagatatagtgttgactcttaccctctttgaagatcgggaaatgattgaggaaagactaaaaacatacgctcacctgttcgacgataaggttatgaaacagttaaagaggcgtcgctatacgggctggggacgattgtcgcggaaacttatcaacgggataagagacaagcaaagtggtaaaactattctcgattttctaaagagcgacggcttcgccaataggaactttatgcagctgatccatgatgactctttaaccttcaaagaggatatacaaaaggcacaggtttccggacaaggggactcattgcacgaacatattgcgaatcttgctggttcgccagccatcaaaaagggcatactccagacagtcaaagtagtggatgagctagttaaggtcatgggacgtcacaaaccggaaaacattgtaatcgagatggcacgcgaaaatcaaacgactcagaaggggcaaaaaaacagtcgagagcggatgaagagaatagaagagggtattaaagaactgggcagccagatcttaaaggagcatcctgtggaaaatacccaattgcagaacgagaaactttacctctattacctacaaaatggaagggacatgtatgttgatcaggaactggacataaaccgtttatctgattacgacgtcgatgccattgtaccccaatcctttttgaaggacgattcaatcgacaataaagtgcttacacgctcggataagaaccgagggaaaagtgacaatgttccaagcgaggaagtcgtaaagaaaatgaagaactattggcggcagctcctaaatgcgaaactgataacgcaaagaaagttcgataacttaactaaagctgagaggggtggcttgtctgaacttgacaaggccggatttattaaacgtcagctcgtggaaacccgccaaatcacaaagcatgttgcacagatactagattcccgaatgaatacgaaatacgacgagaacgataagctgattcgggaagtcaaagtaatcactttaaagtcaaaattggtgtcggacttcagaaaggattttcaattctataaagttagggagataaataactaccaccatgcgcacgacgcttatcttaatgccgtcgtagggaccgcactcattaagaaatacccgaagctagaaagtgagtttgtgtatggtgattacaaagtttatgacgtccgtaagatgatcgcgaaaagcgaacaggagataggcaaggctacagccaaatacttcttttattctaacattatgaatttctttaagacggaaatcactctggcaaacggagagatacgcaaacgacctttaattgaaaccaatggggagacaggtgaaatcgtatgggataagggccgggacttcgcgacggtgagaaaagttttgtccatgccccaagtcaacatagtaaagaaaactgaggtgcagaccggagggttttcaaaggaatcgattcttccaaaaaggaatagtgataagctcatcgctcgtaaaaaggactgggacccgaaaaagtacggtggcttcgatagccctacagttgcctattctgtcctagtagtggcaaaagttgagaagggaaaatccaagaaactgaagtcagtcaaagaattattggggataacgattatggagcgctcgtcttttgaaaagaaccccatcgacttccttgaggcgaaaggttacaaggaagtaaaaaaggatctcataattaaactaccaaagtatagtctgtttgagttagaaaatggccgaaaacggatgttggctagcgccggagagcttcaaaaggggaacgaactcgcactaccgtctaaatacgtgaatttcctgtatttagcgtcccattacgagaagttgaaaggttcacctgaagataacgaacagaagcaactttttgttgagcagcacaaacattatctcgacgaaatcatagagcaaatttcggaattcagtaagagagtcatcctagctgatgccaatctggacaaagtattaagcgcatacaacaagcacagggataaacccatacgtgagcaggcggaaaatattatccatttgtttactcttaccaacctcggcgctccagccgcattcaagtattttgacacaacgatagatcgcaaacgatacacttctaccaaggaggtgctagacgcgacactgattcaccaatccatcacgggattatatgaaactcggatagatttgtcacagcttgggggtgacaactcaaagaaaaggtcactggaggacaacgaaacggaaatcaaagtctccagagacacctggaacactaagaacatgcggtccctggaaccgccacgaagcaagaaacggatacat

SEQ ID NO: 225 - DNA, 4959 bp, Artificial Sequence
  chemically synthesized
atgcccaaaaagaagaggaaagtcagctcttttttggacggtattgacaaagctcaggacgaacatgaaaagtaccactctaactggagagctatggcctccgattttaatcttccgccggtggtagcgaaagaaatcgttgccagttgcgacaaatgccaattgaagggagaagccatgcatggtcaagtggattgttcccccggaatatggcaactcgattgcacgcatctggaaggcaaggtcatcctcgtagcggtacatgttgcttctggatatattgaggccgaggttataccggcagaaacgggccaagaagcggcgtactttctcctgaagcttgcgggacgctggcctgtgaaaacgattcataccgacaacggttctaactttaccggagcaacagtacgggccgcatgctggtgggccggtataaagcaggaatttgggattccacggaatccgcaaagtcaaggtgtcgtcgagtctatgaataaggaactcaaaaagataattggtcaggttagagatcaagccgaacatctcaagacggcggtccaaatggcagtttttattcacaactttaagaggaaaggtgggattggtggctattcagcaggggagcgaatagtggacataatagcaaccgacatacagactaaggagttgcaaaagcagatcacaaagattcaaaatgggggcgggggaagcggcggtggaggtagtggagggggaggatcagataaaaagtattctattggtttagccatcggcactaattccgttggatgggctgtcataaccgatgaatacaaagtaccttcaaagaaatttaaggtgttggggaacacagaccgtcattcgattaaaaagaatcttatcggtgccctcctattcgatagtggcgaaacggcagaggcgactcgcctgaaacgaaccgctcggagaaggtatacacgtcgcaagaaccgaatatgttacttacaagaaatttttagcaatgagatggccaaagttgacgattctttctttcaccgtttggaagagtccttccttgtcgaagaggacaagaaacatgaacggcaccccatctttggaaacatagtagatgaggtggcatatcatgaaaagtacccaacgatttatcacctcagaaaaaagctagttgactcaactgataaagcggacctgaggttaatctacttggctcttgcccatatgataaagttccgtgggcactttctcattgagggtgatctaaatccggacaactcggatgtcgacaaactgttcatccagttagtacaaacctataatcagttgtttgaagagaaccctataaatgcaagtggcgtggatgcgaaggctattcttagcgcccgcctctctaaatcccgacggctagaaaacctgatcgcacaattacccggagagaagaaaaatgggttgttcggtaaccttatagcgctctcactaggcctgacaccaaattttaagtcgaacttcgacttagctgaagatgccaaattgcagcttagtaaggacacgtacgatgacgatctcgacaatctactggcacaaattggagatcagtatgcggacttatttttggctgccaaaaaccttagcgatgcaatcctcctatctgacatactgagagttaatactgagattaccaaggcgccgttatccgcttcaatgatcaaaaggtacgatgaacatcaccaagacttgacacttctcaaggccctagtccgtcagcaactgcctgagaaatataaggaaatattctttgatcagtcgaaaaacgggtacgcaggttatattgacggcggagcgagtcaagaggaattctacaagtttatcaaacccatattagagaagatggatgggacggaagagttgcttgtaaaactcaatcgcgaagatctactgcgaaagcagcggactttcgacaacggtagcattccacatcaaatccacttaggcgaattgcatgctatacttagaaggcaggaggatttttatccgttcctcaaagacaatcgtgaaaagattgagaaaatcctaacctttcgcataccttactatgtgggacccctggcccgagggaactctcggttcgcatggatgacaagaaagtccgaagaaacgattactccatggaattttgaggaagttgtcgataaaggtgcgtcagctcaatcgttcatcgagaggatgaccaactttgacaagaatttaccgaacgaaaaagtattgcctaagcacagtttactttacgagtatttcacagtgtacaatgaactcacgaaagttaagtatgtcactgagggcatgcgtaaacccgcctttctaagcggagaacagaagaaagcaatagtagatctgttattcaagaccaaccgcaaagtgacagttaagcaattgaaagaggactactttaagaaaattgaatgcttcgattctgtcgagatctccggggtagaagatcgatttaatgcgtcacttggtacgtatcatgacctcctaaagataattaaagataaggacttcctggataacgaagagaatgaagatatcttagaagatatagtgttgactcttaccctctttgaagatcgggaaatgattgaggaaagactaaaaacatacgctcacctgttcgacgataaggttatgaaacagttaaagaggcgtcgctatacgggctggggacgattgtcgcggaaacttatcaacgggataagagacaagcaaagtggtaaaactattctcgattttctaaagagcgacggcttcgccaataggaactttatgcagctgatccatgatgactctttaaccttcaaagaggatatacaaaaggcacaggtttccggacaaggggactcattgcacgaacatattgcgaatcttgctggttcgccagccatcaaaaagggcatactccagacagtcaaagtagtggatgagctagttaaggtcatgggacgtcacaaaccggaaaacattgtaatcgagatggcacgcgaaaatcaaacgactcagaaggggcaaaaaaacagtcgagagcggatgaagagaatagaagagggtattaaagaactgggcagccagatcttaaaggagcatcctgtggaaaatacccaattgcagaacgagaaactttacctctattacctacaaaatggaagggacatgtatgttgatcaggaactggacataaaccgtttatctgattacgacgtcgatgccattgtaccccaatcctttttgaaggacgattcaatcgacaataaagtgcttacacgctcggataagaaccgagggaaaagtgacaatgttccaagcgaggaagtcgtaaagaaaatgaagaactattggcggcagctcctaaatgcgaaactgataacgcaaagaaagttcgataacttaactaaagctgagaggggtggcttgtctgaacttgacaaggccggatttattaaacgtcagctcgtggaaacccgccaaatcacaaagcatgttgcacagatactagattcccgaatgaatacgaaatacgacgagaacgataagctgattcgggaagtcaaagtaatcactttaaagtcaaaattggtgtcggacttcagaaaggattttcaattctataaagttagggagataaataactaccaccatgcgcacgacgcttatcttaatgccgtcgtagggaccgcactcattaagaaatacccgaagctagaaagtgagtttgtgtatggtgattacaaagtttatgacgtccgtaagatgatcgcgaaaagcgaacaggagataggcaaggctacagccaaatacttcttttattctaacattatgaatttctttaagacggaaatcactctggcaaacggagagatacgcaaacgacctttaattgaaaccaatggggagacaggtgaaatcgtatgggataagggccgggacttcgcgacggtgagaaaagttttgtccatgccccaagtcaacatagtaaagaaaactgaggtgcagaccggagggttttcaaaggaatcgattcttccaaaaaggaatagtgataagctcatcgctcgtaaaaaggactgggacccgaaaaagtacggtggcttcgatagccctacagttgcctattctgtcctagtagtggcaaaagttgagaagggaaaatccaagaaactgaagtcagtcaaagaattattggggataacgattatggagcgctcgtcttttgaaaagaaccccatcgacttccttgaggcgaaaggttacaaggaagtaaaaaaggatctcataattaaactaccaaagtatagtctgtttgagttagaaaatggccgaaaacggatgttggctagcgccggagagcttcaaaaggggaacgaactcgcactaccgtctaaatacgtgaatttcctgtatttagcgtcccattacgagaagttgaaaggttcacctgaagataacgaacagaagcaactttttgttgagcagcacaaacattatctcgacgaaatcatagagcaaatttcggaattcagtaagagagtcatcctagctgatgccaatctggacaaagtattaagcgcatacaacaagcacagggataaacccatacgtgagcaggcggaaaatattatccatttgtttactcttaccaacctcggcgctccagccgcattcaagtattttgacacaacgatagatcgcaaacgatacacttctaccaaggaggtgctagacgcgacactgattcaccaatccatcacgggattatatgaaactcggatagatttgtcacagcttgggggtgacaactcaaagaaaaggtcactggaggacaacgaaacggaaatcaaagtctccagagacacctggaacactaagaacatgcggtccctggaaccgccacgaagcaagaaacggatacat

SEQ ID NO: 226 - DNA, 5157 bp, Artificial Sequence
  chemically synthesized
atgcccaaaaagaagaggaaagtcagctcttttttggacggtattgacaaagctcaggacgaacatgaaaagtaccactctaactggagagctatggcctccgattttaatcttccgccggtggtagcgaaagaaatcgttgccagttgcgacaaatgccaattgaagggagaagccatgcatggtcaagtggattgttcccccggaatatggcaactcgattgcacgcatctggaaggcaaggtcatcctcgtagcggtacatgttgcttctggatatattgaggccgaggttataccggcagaaacgggccaagaaacagcgtactttctcctgaagcttgcgggacgctggcctgtgaaaacgattcataccgacaacggttctaactttaccggagcaacagtacgggccgcatgctggtgggccggtataaagcaggaatttagcattccatacaatccgcaaagtcacggtgtcgtcgagtctatgaataaggaactcaaaaagataattggtcaggttagagatcaagccgaacatctcaagacggcggtccaaatggcagtttttattcacaactttaagaggaaaggtgggattggtggctattcagcaggggagcgaatagtggacataatagcaaccgacatacagactaaggagttgcaaaagcagatcacaaagattcaaaattttcgggtttattaccgcgatagccggaatccgctttggaaaggtcctgcgaaacttttgtggaagggcgagggagctgtcgtcattcaggataacagcgacatcaaggtcgttccgcggcgcaaggcgaaaatcatacgggactatggtaaacaaatggccggggatgactgcgttgcgtcccggcaagacgaggatgggggcgggggaagcggcggtggaggtagtggagggggaggatcagataaaaagtattctattggtttagccatcggcactaattccgttggatgggctgtcataaccgatgaatacaaagtaccttcaaagaaatttaaggtgttggggaacacagaccgtcattcgattaaaaagaatcttatcggtgccctcctattcgatagtggcgaaacggcagaggcgactcgcctgaaacgaaccgctcggagaaggtatacacgtcgcaagaaccgaatatgttacttacaagaaatttttagcaatgagatggccaaagttgacgattctttctttcaccgtttggaagagtccttccttgtcgaagaggacaagaaacatgaacggcaccccatctttggaaacatagtagatgaggtggcatatcatgaaaagtacccaacgatttatcacctcagaaaaaagctagttgactcaactgataaagcggacctgaggttaatctacttggctcttgcccatatgataaagttccgtgggcactttctcattgagggtgatctaaatccggacaactcggatgtcgacaaactgttcatccagttagtacaaacctataatcagttgtttgaagagaaccctataaatgcaagtggcgtggatgcgaaggctattcttagcgcccgcctctctaaatcccgacggctagaaaacctgatcgcacaattacccggagagaagaaaaatgggttgttcggtaaccttatagcgctctcactaggcctgacaccaaattttaagtcgaacttcgacttagctgaagatgccaaattgcagcttagtaaggacacgtacgatgacgatctcgacaatctactggcacaaattggagatcagtatgcggacttatttttggctgccaaaaaccttagcgatgcaatcctcctatctgacatactgagagttaatactgagattaccaaggcgccgttatccgcttcaatgatcaaaaggtacgatgaacatcaccaagacttgacacttctcaaggccctagtccgtcagcaactgcctgagaaatataaggaaatattctttgatcagtcgaaaaacgggtacgcaggttatattgacggcggagcgagtcaagaggaattctacaagtttatcaaacccatattagagaagatggatgggacggaagagttgcttgtaaaactcaatcgcgaagatctactgcgaaagcagcggactttcgacaacggtagcattccacatcaaatccacttaggcgaattgcatgctatacttagaaggcaggaggatttttatccgttcctcaaagacaatcgtgaaaagattgagaaaatcctaacctttcgcataccttactatgtgggacccctggcccgagggaactctcggttcgcatggatgacaagaaagtccgaagaaacgattactccatggaattttgaggaagttgtcgataaaggtgcgtcagctcaatcgttcatcgagaggatgaccaactttgacaagaatttaccgaacgaaaaagtattgcctaagcacagtttactttacgagtatttcacagtgtacaatgaactcacgaaagttaagtatgtcactgagggcatgcgtaaacccgcctttctaagcggagaacagaagaaagcaatagtagatctgttattcaagaccaaccgcaaagtgacagttaagcaattgaaagaggactactttaagaaaattgaatgcttcgattctgtcgagatctccggggtagaagatcgatttaatgcgtcacttggtacgtatcatgacctcctaaagataattaaagataaggacttcctggataacgaagagaatgaagatatcttagaagatatagtgttgactcttaccctctttgaagatcgggaaatgattgaggaaagactaaaaacatacgctcacctgttcgacgataaggttatgaaacagttaaagaggcgtcgctatacgggctggggacgattgtcgcggaaacttatcaacgggataagagacaagcaaagtggtaaaactattctcgattttctaaagagcgacggcttcgccaataggaactttatgcagctgatccatgatgactctttaaccttcaaagaggatatacaaaaggcacaggtttccggacaaggggactcattgcacgaacatattgcgaatcttgctggttcgccagccatcaaaaagggcatactccagacagtcaaagtagtggatgagctagttaaggtcatgggacgtcacaaaccggaaaacattgtaatcgagatggcacgcgaaaatcaaacgactcagaaggggcaaaaaaacagtcgagagcggatgaagagaatagaagagggtattaaagaactgggcagccagatcttaaaggagcatcctgtggaaaatacccaattgcagaacgagaaactttacctctattacctacaaaatggaagggacatgtatgttgatcaggaactggacataaaccgtttatctgattacgacgtcgatgccattgtaccccaatcctttttgaaggacgattcaatcgacaataaagtgcttacacgctcggataagaaccgagggaaaagtgacaatgttccaagcgaggaagtcgtaaagaaaatgaagaactattggcggcagctcctaaatgcgaaactgataacgcaaagaaagttcgataacttaactaaagctgagaggggtggcttgtctgaacttgacaaggccggatttattaaacgtcagctcgtggaaacccgccaaatcacaaagcatgttgcacagatactagattcccgaatgaatacgaaatacgacgagaacgataagctgattcgggaagtcaaagtaatcactttaaagtcaaaattggtgtcggacttcagaaaggattttcaattctataaagttagggagataaataactaccaccatgcgcacgacgcttatcttaatgccgtcgtagggaccgcactcattaagaaatacccgaagctagaaagtgagtttgtgtatggtgattacaaagtttatgacgtccgtaagatgatcgcgaaaagcgaacaggagataggcaaggctacagccaaatacttcttttattctaacattatgaatttctttaagacggaaatcactctggcaaacggagagatacgcaaacgacctttaattgaaaccaatggggagacaggtgaaatcgtatgggataagggccgggacttcgcgacggtgagaaaagttttgtccatgccccaagtcaacatagtaaagaaaactgaggtgcagaccggagggttttcaaaggaatcgattcttccaaaaaggaatagtgataagctcatcgctcgtaaaaaggactgggacccgaaaaagtacggtggcttcgatagccctacagttgcctattctgtcctagtagtggcaaaagttgagaagggaaaatccaagaaactgaagtcagtcaaagaattattggggataacgattatggagcgctcgtcttttgaaaagaaccccatcgacttccttgaggcgaaaggttacaaggaagtaaaaaaggatctcataattaaactaccaaagtatagtctgtttgagttagaaaatggccgaaaacggatgttggctagcgccggagagcttcaaaaggggaacgaactcgcactaccgtctaaatacgtgaatttcctgtatttagcgtcccattacgagaagttgaaaggttcacctgaagataacgaacagaagcaactttttgttgagcagcacaaacattatctcgacgaaatcatagagcaaatttcggaattcagtaagagagtcatcctagctgatgccaatctggacaaagtattaagcgcatacaacaagcacagggataaacccatacgtgagcaggcggaaaatattatccatttgtttactcttaccaacctcggcgctccagccgcattcaagtattttgacacaacgatagatcgcaaacgatacacttctaccaaggaggtgctagacgcgacactgattcaccaatccatcacgggattatatgaaactcggatagatttgtcacagcttgggggtgacaactcaaagaaaaggtcactggaggacaacgaaacggaaatcaaagtctccagagacacctggaacactaagaacatgcggtccctggaaccgccacgaagcaagaaacggatacat

SEQ ID NO: 227 - DNA, 4959 bp, Artificial Sequence
  chemically synthesized
atgcccaaaaagaagaggaaagtcagctcttttttggacggtattgacaaagctcaggacgaacatgaaaagtaccactctaactggagagctatggcctccgattttaatcttccgccggtggtagcgaaagaaatcgttgccagttgcgacaaatgccaattgaagggagaagccatgcatggtcaagtggattgttcccccggaatatggcaactcgattgcacgcatctggaaggcaaggtcatcctcgtagcggtacatgttgcttctggatatattgaggccgaggttataccggcagaaacgggccaagaaacagcgtactttctcctgaagcttgcgggacgctggcctgtgaaaacgattcataccgacaacggttctaactttaccggagcaacagtacgggccgcatgctggtgggccggtataaagcaggaatttagcattccatacaatccgcaaagtcacggtgtcgtcgagtctatgaataaggaactcaaaaagataattggtcaggttagagatcaagccgaacatctcaagacggcggtccaaatggcagtttttattcacaactttaagaggaaaggtgggattggtggctattcagcaggggagcgaatagtggacataatagcaaccgacatacagactaaggagttgcaaaagcagatcacaaagattcaaaatgggggcgggggaagcggcggtggaggtagtggagggggaggatcagataaaaagtattctattggtttagccatcggcactaattccgttggatgggctgtcataaccgatgaatacaaagtaccttcaaagaaatttaaggtgttggggaacacagaccgtcattcgattaaaaagaatcttatcggtgccctcctattcgatagtggcgaaacggcagaggcgactcgcctgaaacgaaccgctcggagaaggtatacacgtcgcaagaaccgaatatgttacttacaagaaatttttagcaatgagatggccaaagttgacgattctttctttcaccgtttggaagagtccttccttgtcgaagaggacaagaaacatgaacggcaccccatctttggaaacatagtagatgaggtggcatatcatgaaaagtacccaacgatttatcacctcagaaaaaagctagttgactcaactgataaagcggacctgaggttaatctacttggctcttgcccatatgataaagttccgtgggcactttctcattgagggtgatctaaatccggacaactcggatgtcgacaaactgttcatccagttagtacaaacctataatcagttgtttgaagagaaccctataaatgcaagtggcgtggatgcgaaggctattcttagcgcccgcctctctaaatcccgacggctagaaaacctgatcgcacaattacccggagagaagaaaaatgggttgttcggtaaccttatagcgctctcactaggcctgacaccaaattttaagtcgaacttcgacttagctgaagatgccaaattgcagcttagtaaggacacgtacgatgacgatctcgacaatctactggcacaaattggagatcagtatgcggacttatttttggctgccaaaaaccttagcgatgcaatcctcctatctgacatactgagagttaatactgagattaccaaggcgccgttatccgcttcaatgatcaaaaggtacgatgaacatcaccaagacttgacacttctcaaggccctagtccgtcagcaactgcctgagaaatataaggaaatattctttgatcagtcgaaaaacgggtacgcaggttatattgacggcggagcgagtcaagaggaattctacaagtttatcaaacccatattagagaagatggatgggacggaagagttgcttgtaaaactcaatcgcgaagatctactgcgaaagcagcggactttcgacaacggtagcattccacatcaaatccacttaggcgaattgcatgctatacttagaaggcaggaggatttttatccgttcctcaaagacaatcgtgaaaagattgagaaaatcctaacctttcgcataccttactatgtgggacccctggcccgagggaactctcggttcgcatggatgacaagaaagtccgaagaaacgattactccatggaattttgaggaagttgtcgataaaggtgcgtcagctcaatcgttcatcgagaggatgaccaactttgacaagaatttaccgaacgaaaaagtattgcctaagcacagtttactttacgagtatttcacagtgtacaatgaactcacgaaagttaagtatgtcactgagggcatgcgtaaacccgcctttctaagcggagaacagaagaaagcaatagtagatctgttattcaagaccaaccgcaaagtgacagttaagcaattgaaagaggactactttaagaaaattgaatgcttcgattctgtcgagatctccggggtagaagatcgatttaatgcgtcacttggtacgtatcatgacctcctaaagataattaaagataaggacttcctggataacgaagagaatgaagatatcttagaagatatagtgttgactcttaccctctttgaagatcgggaaatgattgaggaaagactaaaaacatacgctcacctgttcgacgataaggttatgaaacagttaaagaggcgtcgctatacgggctggggacgattgtcgcggaaacttatcaacgggataagagacaagcaaagtggtaaaactattctcgattttctaaagagcgacggcttcgccaataggaactttatgcagctgatccatgatgactctttaaccttcaaagaggatatacaaaaggcacaggtttccggacaaggggactcattgcacgaacatattgcgaatcttgctggttcgccagccatcaaaaagggcatactccagacagtcaaagtagtggatgagctagttaaggtcatgggacgtcacaaaccggaaaacattgtaatcgagatggcacgcgaaaatcaaacgactcagaaggggcaaaaaaacagtcgagagcggatgaagagaatagaagagggtattaaagaactgggcagccagatcttaaaggagcatcctgtggaaaatacccaattgcagaacgagaaactttacctctattacctacaaaatggaagggacatgtatgttgatcaggaactggacataaaccgtttatctgattacgacgtcgatgccattgtaccccaatcctttttgaaggacgattcaatcgacaataaagtgcttacacgctcggataagaaccgagggaaaagtgacaatgttccaagcgaggaagtcgtaaagaaaatgaagaactattggcggcagctcctaaatgcgaaactgataacgcaaagaaagttcgataacttaactaaagctgagaggggtggcttgtctgaacttgacaaggccggatttattaaacgtcagctcgtggaaacccgccaaatcacaaagcatgttgcacagatactagattcccgaatgaatacgaaatacgacgagaacgataagctgattcgggaagtcaaagtaatcactttaaagtcaaaattggtgtcggacttcagaaaggattttcaattctataaagttagggagataaataactaccaccatgcgcacgacgcttatcttaatgccgtcgtagggaccgcactcattaagaaatacccgaagctagaaagtgagtttgtgtatggtgattacaaagtttatgacgtccgtaagatgatcgcgaaaagcgaacaggagataggcaaggctacagccaaatacttcttttattctaacattatgaatttctttaagacggaaatcactctggcaaacggagagatacgcaaacgacctttaattgaaaccaatggggagacaggtgaaatcgtatgggataagggccgggacttcgcgacggtgagaaaagttttgtccatgccccaagtcaacatagtaaagaaaactgaggtgcagaccggagggttttcaaaggaatcgattcttccaaaaaggaatagtgataagctcatcgctcgtaaaaaggactgggacccgaaaaagtacggtggcttcgatagccctacagttgcctattctgtcctagtagtggcaaaagttgagaagggaaaatccaagaaactgaagtcagtcaaagaattattggggataacgattatggagcgctcgtcttttgaaaagaaccccatcgacttccttgaggcgaaaggttacaaggaagtaaaaaaggatctcataattaaactaccaaagtatagtctgtttgagttagaaaatggccgaaaacggatgttggctagcgccggagagcttcaaaaggggaacgaactcgcactaccgtctaaatacgtgaatttcctgtatttagcgtcccattacgagaagttgaaaggttcacctgaagataacgaacagaagcaactttttgttgagcagcacaaacattatctcgacgaaatcatagagcaaatttcggaattcagtaagagagtcatcctagctgatgccaatctggacaaagtattaagcgcatacaacaagcacagggataaacccatacgtgagcaggcggaaaatattatccatttgtttactcttaccaacctcggcgctccagccgcattcaagtattttgacacaacgatagatcgcaaacgatacacttctaccaaggaggtgctagacgcgacactgattcaccaatccatcacgggattatatgaaactcggatagatttgtcacagcttgggggtgacaactcaaagaaaaggtcactggaggacaacgaaacggaaatcaaagtctccagagacacctggaacactaagaacatgcggtccctggaaccgccacgaagcaagaaacggatacat

SEQ ID NO: 228 - DNA, 5262 bp, Artificial Sequence
  chemically synthesized
atgcccaaaaagaagaggaaagtcagctctccacttcgcgaggctaaggatttgcatactgcccttcatataggcccacgagctttgtcaaaagcctgtaatatcagcatgcagcaggcgagggaggtggtacagacctgtcctcactgcaatagtgccccagcccttgaggcaggggtcaatcccagagggcttgggccgcttcagatttggcaaacagatttcactcttgaaccgcgaatggcaccccggagttggcttgctgtaaccgtagatactgcgagtagcgctattgtggtcacacaacacggtagagtcacatccgtcgctgtgcaacatcattgggctaccgcaatagcggtattgggccgacctaaggcgattaagaccgacaacgggtcttgtttcactagcaagtctacacgggagtggctggctagatgggggattgcgcatacgaccgggattccgggcaacagtcagggtcaggccatggtagaaagggccaatcgccttctcaaggataggattcgggtactggccgagggtgatggctttatgaaacgcatcccaacatcaaagcagggggagcttctcgctaaggcgatgtatgcacttaatcattttgagagaggcgagaacactaagacgccaatacagaagcactggagacctacagtccttaccgaaggtccgcccgtcaaaattcggatcgaaacaggtgaatgggagaaaggatggaacgttcttgtttggggtcgaggctatgccgctgtgaagaatcgcgacactgataaggtgatatgggtcccgtcacgcaaagttaagcctgacatcacccaaaaagacgaggtcaccaaaaaggacgaagccagccccttgtttgctggaatttcagattggataccctgggaggatgagcaggaggggctccaaggagagactgcgtctaacaagcaggagagaccaggggaggatactctggcggccaatgaatctgggggcgggggaagcggcggtggaggtagtggagggggaggatcagataaaaagtattctattggtttagccatcggcactaattccgttggatgggctgtcataaccgatgaatacaaagtaccttcaaagaaatttaaggtgttggggaacacagaccgtcattcgattaaaaagaatcttatcggtgccctcctattcgatagtggcgaaacggcagaggcgactcgcctgaaacgaaccgctcggagaaggtatacacgtcgcaagaaccgaatatgttacttacaagaaatttttagcaatgagatggccaaagttgacgattctttctttcaccgtttggaagagtccttccttgtcgaagaggacaagaaacatgaacggcaccccatctttggaaacatagtagatgaggtggcatatcatgaaaagtacccaacgatttatcacctcagaaaaaagctagttgactcaactgataaagcggacctgaggttaatctacttggctcttgcccatatgataaagttccgtgggcactttctcattgagggtgatctaaatccggacaactcggatgtcgacaaactgttcatccagttagtacaaacctataatcagttgtttgaagagaaccctataaatgcaagtggcgtggatgcgaaggctattcttagcgcccgcctctctaaatcccgacggctagaaaacctgatcgcacaattacccggagagaagaaaaatgggttgttcggtaaccttatagcgctctcactaggcctgacaccaaattttaagtcgaacttcgacttagctgaagatgccaaattgcagcttagtaaggacacgtacgatgacgatctcgacaatctactggcacaaattggagatcagtatgcggacttatttttggctgccaaaaaccttagcgatgcaatcctcctatctgacatactgagagttaatactgagattaccaaggcgccgttatccgcttcaatgatcaaaaggtacgatgaacatcaccaagacttgacacttctcaaggccctagtccgtcagcaactgcctgagaaatataaggaaatattctttgatcagtcgaaaaacgggtacgcaggttatattgacggcggagcgagtcaagaggaattctacaagtttatcaaacccatattagagaagatggatgggacggaagagttgcttgtaaaactcaatcgcgaagatctactgcgaaagcagcggactttcgacaacggtagcattccacatcaaatccacttaggcgaattgcatgctatacttagaaggcaggaggatttttatccgttcctcaaagacaatcgtgaaaagattgagaaaatcctaacctttcgcataccttactatgtgggacccctggcccgagggaactctcggttcgcatggatgacaagaaagtccgaagaaacgattactccatggaattttgaggaagttgtcgataaaggtgcgtcagctcaatcgttcatcgagaggatgaccaactttgacaagaatttaccgaacgaaaaagtattgcctaagcacagtttactttacgagtatttcacagtgtacaatgaactcacgaaagttaagtatgtcactgagggcatgcgtaaacccgcctttctaagcggagaacagaagaaagcaatagtagatctgttattcaagaccaaccgcaaagtgacagttaagcaattgaaagaggactactttaagaaaattgaatgcttcgattctgtcgagatctccggggtagaagatcgatttaatgcgtcacttggtacgtatcatgacctcctaaagataattaaagataaggacttcctggataacgaagagaatgaagatatcttagaagatatagtgttgactcttaccctctttgaagatcgggaaatgattgaggaaagactaaaaacatacgctcacctgttcgacgataaggttatgaaacagttaaagaggcgtcgctatacgggctggggacgattgtcgcggaaacttatcaacgggataagagacaagcaaagtggtaaaactattctcgattttctaaagagcgacggcttcgccaataggaactttatgcagctgatccatgatgactctttaaccttcaaagaggatatacaaaaggcacaggtttccggacaaggggactcattgcacgaacatattgcgaatcttgctggttcgccagccatcaaaaagggcatactccagacagtcaaagtagtggatgagctagttaaggtcatgggacgtcacaaaccggaaaacattgtaatcgagatggcacgcgaaaatcaaacgactcagaaggggcaaaaaaacagtcgagagcggatgaagagaatagaagagggtattaaagaactgggcagccagatcttaaaggagcatcctgtggaaaatacccaattgcagaacgagaaactttacctctattacctacaaaatggaagggacatgtatgttgatcaggaactggacataaaccgtttatctgattacgacgtcgatgccattgtaccccaatcctttttgaaggacgattcaatcgacaataaagtgcttacacgctcggataagaaccgagggaaaagtgacaatgttccaagcgaggaagtcgtaaagaaaatgaagaactattggcggcagctcctaaatgcgaaactgataacgcaaagaaagttcgataacttaactaaagctgagaggggtggcttgtctgaacttgacaaggccggatttattaaacgtcagctcgtggaaacccgccaaatcacaaagcatgttgcacagatactagattcccgaatgaatacgaaatacgacgagaacgataagctgattcgggaagtcaaagtaatcactttaaagtcaaaattggtgtcggacttcagaaaggattttcaattctataaagttagggagataaataactaccaccatgcgcacgacgcttatcttaatgccgtcgtagggaccgcactcattaagaaatacccgaagctagaaagtgagtttgtgtatggtgattacaaagtttatgacgtccgtaagatgatcgcgaaaagcgaacaggagataggcaaggctacagccaaatacttcttttattctaacattatgaatttctttaagacggaaatcactctggcaaacggagagatacgcaaacgacctttaattgaaaccaatggggagacaggtgaaatcgtatgggataagggccgggacttcgcgacggtgagaaaagttttgtccatgccccaagtcaacatagtaaagaaaactgaggtgcagaccggagggttttcaaaggaatcgattcttccaaaaaggaatagtgataagctcatcgctcgtaaaaaggactgggacccgaaaaagtacggtggcttcgatagccctacagttgcctattctgtcctagtagtggcaaaagttgagaagggaaaatccaagaaactgaagtcagtcaaagaattattggggataacgattatggagcgctcgtcttttgaaaagaaccccatcgacttccttgaggcgaaaggttacaaggaagtaaaaaaggatctcataattaaactaccaaagtatagtctgtttgagttagaaaatggccgaaaacggatgttggctagcgccggagagcttcaaaaggggaacgaactcgcactaccgtctaaatacgtgaatttcctgtatttagcgtcccattacgagaagttgaaaggttcacctgaagataacgaacagaagcaactttttgttgagcagcacaaacattatctcgacgaaatcatagagcaaatttcggaattcagtaagagagtcatcctagctgatgccaatctggacaaagtattaagcgcatacaacaagcacagggataaacccatacgtgagcaggcggaaaatattatccatttgtttactcttaccaacctcggcgctccagccgcattcaagtattttgacacaacgatagatcgcaaacgatacacttctaccaaggaggtgctagacgcgacactgattcaccaatccatcacgggattatatgaaactcggatagatttgtcacagcttgggggtgacaactcaaagaaaaggtcactggaggacaacgaaacggaaatcaaagtctccagagacacctggaacactaagaacatgcggtccctggaaccgccacgaagcaagaaacggatacat

SEQ ID NO: 229 - DNA, 4956 bp, Artificial Sequence
  chemically synthesized
atgcccaaaaagaagaggaaagtcagctctccacttcgcgaggctaaggatttgcatactgcccttcatataggcccacgagctttgtcaaaagcctgtaatatcagcatgcagcaggcgagggaggtggtacagacctgtcctcactgcaatagtgccccagcccttgaggcaggggtcaatcccagagggcttgggccgcttcagatttggcaaacagatttcactcttgaaccgcgaatggcaccccggagttggcttgctgtaaccgtagatactgcgagtagcgctattgtggtcacacaacacggtagagtcacatccgtcgctgtgcaacatcattgggctaccgcaatagcggtattgggccgacctaaggcgattaagaccgacaacgggtcttgtttcactagcaagtctacacgggagtggctggctagatgggggattgcgcatacgaccgggattccgggcaacagtcagggtcaggccatggtagaaagggccaatcgccttctcaaggataggattcgggtactggccgagggtgatggctttatgaaacgcatcccaacatcaaagcagggggagcttctcgctaaggcgatgtatgcacttaatcattttgagagaggcgagaacactaagacgccaatacagaagcactggagacctacagtccttaccgaaggtgggggcgggggaagcggcggtggaggtagtggagggggaggatcagataaaaagtattctattggtttagccatcggcactaattccgttggatgggctgtcataaccgatgaatacaaagtaccttcaaagaaatttaaggtgttggggaacacagaccgtcattcgattaaaaagaatcttatcggtgccctcctattcgatagtggcgaaacggcagaggcgactcgcctgaaacgaaccgctcggagaaggtatacacgtcgcaagaaccgaatatgttacttacaagaaatttttagcaatgagatggccaaagttgacgattctttctttcaccgtttggaagagtccttccttgtcgaagaggacaagaaacatgaacggcaccccatctttggaaacatagtagatgaggtggcatatcatgaaaagtacccaacgatttatcacctcagaaaaaagctagttgactcaactgataaagcggacctgaggttaatctacttggctcttgcccatatgataaagttccgtgggcactttctcattgagggtgatctaaatccggacaactcggatgtcgacaaactgttcatccagttagtacaaacctataatcagttgtttgaagagaaccctataaatgcaagtggcgtggatgcgaaggctattcttagcgcccgcctctctaaatcccgacggctagaaaacctgatcgcacaattacccggagagaagaaaaatgggttgttcggtaaccttatagcgctctcactaggcctgacaccaaattttaagtcgaacttcgacttagctgaagatgccaaattgcagcttagtaaggacacgtacgatgacgatctcgacaatctactggcacaaattggagatcagtatgcggacttatttttggctgccaaaaaccttagcgatgcaatcctcctatctgacatactgagagttaatactgagattaccaaggcgccgttatccgcttcaatgatcaaaaggtacgatgaacatcaccaagacttgacacttctcaaggccctagtccgtcagcaactgcctgagaaatataaggaaatattctttgatcagtcgaaaaacgggtacgcaggttatattgacggcggagcgagtcaagaggaattctacaagtttatcaaacccatattagagaagatggatgggacggaagagttgcttgtaaaactcaatcgcgaagatctactgcgaaagcagcggactttcgacaacggtagcattccacatcaaatccacttaggcgaattgcatgctatacttagaaggcaggaggatttttatccgttcctcaaagacaatcgtgaaaagattgagaaaatcctaacctttcgcataccttactatgtgggacccctggcccgagggaactctcggttcgcatggatgacaagaaagtccgaagaaacgattactccatggaattttgaggaagttgtcgataaaggtgcgtcagctcaatcgttcatcgagaggatgaccaactttgacaagaatttaccgaacgaaaaagtattgcctaagcacagtttactttacgagtatttcacagtgtacaatgaactcacgaaagttaagtatgtcactgagggcatgcgtaaacccgcctttctaagcggagaacagaagaaagcaatagtagatctgttattcaagaccaaccgcaaagtgacagttaagcaattgaaagaggactactttaagaaaattgaatgcttcgattctgtcgagatctccggggtagaagatcgatttaatgcgtcacttggtacgtatcatgacctcctaaagataattaaagataaggacttcctggataacgaagagaatgaagatatcttagaagatatagtgttgactcttaccctctttgaagatcgggaaatgattgaggaaagactaaaaacatacgctcacctgttcgacgataaggttatgaaacagttaaagaggcgtcgctatacgggctggggacgattgtcgcggaaacttatcaacgggataagagacaagcaaagtggtaaaactattctcgattttctaaagagcgacggcttcgccaataggaactttatgcagctgatccatgatgactctttaaccttcaaagaggatatacaaaaggcacaggtttccggacaaggggactcattgcacgaacatattgcgaatcttgctggttcgccagccatcaaaaagggcatactccagacagtcaaagtagtggatgagctagttaaggtcatgggacgtcacaaaccggaaaacattgtaatcgagatggcacgcgaaaatcaaacgactcagaaggggcaaaaaaacagtcgagagcggatgaagagaatagaagagggtattaaagaactgggcagccagatcttaaaggagcatcctgtggaaaatacccaattgcagaacgagaaactttacctctattacctacaaaatggaagggacatgtatgttgatcaggaactggacataaaccgtttatctgattacgacgtcgatgccattgtaccccaatcctttttgaaggacgattcaatcgacaataaagtgcttacacgctcggataagaaccgagggaaaagtgacaatgttccaagcgaggaagtcgtaaagaaaatgaagaactattggcggcagctcctaaatgcgaaactgataacgcaaagaaagttcgataacttaactaaagctgagaggggtggcttgtctgaacttgacaaggccggatttattaaacgtcagctcgtggaaacccgccaaatcacaaagcatgttgcacagatactagattcccgaatgaatacgaaatacgacgagaacgataagctgattcgggaagtcaaagtaatcactttaaagtcaaaattggtgtcggacttcagaaaggattttcaattctataaagttagggagataaataactaccaccatgcgcacgacgcttatcttaatgccgtcgtagggaccgcactcattaagaaatacccgaagctagaaagtgagtttgtgtatggtgattacaaagtttatgacgtccgtaagatgatcgcgaaaagcgaacaggagataggcaaggctacagccaaatacttcttttattctaacattatgaatttctttaagacggaaatcactctggcaaacggagagatacgcaaacgacctttaattgaaaccaatggggagacaggtgaaatcgtatgggataagggccgggacttcgcgacggtgagaaaagttttgtccatgccccaagtcaacatagtaaagaaaactgaggtgcagaccggagggttttcaaaggaatcgattcttccaaaaaggaatagtgataagctcatcgctcgtaaaaaggactgggacccgaaaaagtacggtggcttcgatagccctacagttgcctattctgtcctagtagtggcaaaagttgagaagggaaaatccaagaaactgaagtcagtcaaagaattattggggataacgattatggagcgctcgtcttttgaaaagaaccccatcgacttccttgaggcgaaaggttacaaggaagtaaaaaaggatctcataattaaactaccaaagtatagtctgtttgagttagaaaatggccgaaaacggatgttggctagcgccggagagcttcaaaaggggaacgaactcgcactaccgtctaaatacgtgaatttcctgtatttagcgtcccattacgagaagttgaaaggttcacctgaagataacgaacagaagcaactttttgttgagcagcacaaacattatctcgacgaaatcatagagcaaatttcggaattcagtaagagagtcatcctagctgatgccaatctggacaaagtattaagcgcatacaacaagcacagggataaacccatacgtgagcaggcggaaaatattatccatttgtttactcttaccaacctcggcgctccagccgcattcaagtattttgacacaacgatagatcgcaaacgatacacttctaccaaggaggtgctagacgcgacactgattcaccaatccatcacgggattatatgaaactcggatagatttgtcacagcttgggggtgacaactcaaagaaaaggtcactggaggacaacgaaacggaaatcaaagtctccagagacacctggaacactaagaacatgcggtccctggaaccgccacgaagcaagaaacggatacat

SEQ ID NO: 230 - DNA, 5469 bp, Artificial Sequence
  chemically synthesized
atgcccaaaaagaagaggaaagtcagctcttgcaataccaaaaaacccaatctggatgcggagttggaccagttgctgcaaggtcactatatcaaggggtatcccaagcaatatacctattttctcgaagatgggaaggtaaaagtctctcggcccgagggcgtaaagattattccaccccaatcagaccgccaaaagatagttcttcaggcacataaccttgcccatacggggcgcgaggctacgctccttaagatcgcgaatctttattggtggcccaatatgcgaaaagacgtagtcaagcagcttggacgatgtcaacagtgtcttattacgaatgctagtaataaggcatctgggcctattcttagacccgaccggcctcaaaagccgtttgataagttcttcatcgactatattggaccattgccgcccagccagggttatctttatgtgttggtggtggtagacggtatgactggattcacatggctgtatcccacaaaggcgccgagcacgtccgctactgtaaaaagtctgaatgttctcacctccatagccatacctaaggttatccattccgaccaaggcgcggcgttcaccagtagtacctttgcggagtgggcaaaggagcggggtatccatttggagttctctacaccataccacccacagtcaggctcaaaggttgaacgaaagaatagcgatattaagaggctcctcacgaagctgctcgtgggacgaccaacaaaatggtacgatttgcttccggtcgtacagttggcactgaacaatacctacagcccggttctgaaatatacgccgcatcagcttctgttcggaatcgacagtaatacaccttttgccaaccaggacacactggatcttactagagaggaggaactgagtcttctgcaggagattcgcacttcactttaccatccgtctactccccctgcttcatcaagatcatggagtcccgttgtgggccagcttgttcaggaaagagtggcccgcccagccagtcttcggcctagatggcataagcccagcacagtacttaaggtactgaaccctaggacggttgtcatactcgatcacctgggcaataaccggactgtaagcatagataatctcaaaccaacatcccaccaaaatggcacgactaatgataccgcaacaatggatcatctggagaaaaatgaggggggcgggggaagcggcggtggaggtagtggagggggaggatcagataaaaagtattctattggtttagccatcggcactaattccgttggatgggctgtcataaccgatgaatacaaagtaccttcaaagaaatttaaggtgttggggaacacagaccgtcattcgattaaaaagaatcttatcggtgccctcctattcgatagtggcgaaacggcagaggcgactcgcctgaaacgaaccgctcggagaaggtatacacgtcgcaagaaccgaatatgttacttacaagaaatttttagcaatgagatggccaaagttgacgattctttctttcaccgtttggaagagtccttccttgtcgaagaggacaagaaacatgaacggcaccccatctttggaaacatagtagatgaggtggcatatcatgaaaagtacccaacgatttatcacctcagaaaaaagctagttgactcaactgataaagcggacctgaggttaatctacttggctcttgcccatatgataaagttccgtgggcactttctcattgagggtgatctaaatccggacaactcggatgtcgacaaactgttcatccagttagtacaaacctataatcagttgtttgaagagaaccctataaatgcaagtggcgtggatgcgaaggctattcttagcgcccgcctctctaaatcccgacggctagaaaacctgatcgcacaattacccggagagaagaaaaatgggttgttcggtaaccttatagcgctctcactaggcctgacaccaaattttaagtcgaacttcgacttagctgaagatgccaaattgcagcttagtaaggacacgtacgatgacgatctcgacaatctactggcacaaattggagatcagtatgcggacttatttttggctgccaaaaaccttagcgatgcaatcctcctatctgacatactgagagttaatactgagattaccaaggcgccgttatccgcttcaatgatcaaaaggtacgatgaacatcaccaagacttgacacttctcaaggccctagtccgtcagcaactgcctgagaaatataaggaaatattctttgatcagtcgaaaaacgggtacgcaggttatattgacggcggagcgagtcaagaggaattctacaagtttatcaaacccatattagagaagatggatgggacggaagagttgcttgtaaaactcaatcgcgaagatctactgcgaaagcagcggactttcgacaacggtagcattccacatcaaatccacttaggcgaattgcatgctatacttagaaggcaggaggatttttatccgttcctcaaagacaatcgtgaaaagattgagaaaatcctaacctttcgcataccttactatgtgggacccctggcccgagggaactctcggttcgcatggatgacaagaaagtccgaagaaacgattactccatggaattttgaggaagttgtcgataaaggtgcgtcagctcaatcgttcatcgagaggatgaccaactttgacaagaatttaccgaacgaaaaagtattgcctaagcacagtttactttacgagtatttcacagtgtacaatgaactcacgaaagttaagtatgtcactgagggcatgcgtaaacccgcctttctaagcggagaacagaagaaagcaatagtagatctgttattcaagaccaaccgcaaagtgacagttaagcaattgaaagaggactactttaagaaaattgaatgcttcgattctgtcgagatctccggggtagaagatcgatttaatgcgtcacttggtacgtatcatgacctcctaaagataattaaagataaggacttcctggataacgaagagaatgaagatatcttagaagatatagtgttgactcttaccctctttgaagatcgggaaatgattgaggaaagactaaaaacatacgctcacctgttcgacgataaggttatgaaacagttaaagaggcgtcgctatacgggctggggacgattgtcgcggaaacttatcaacgggataagagacaagcaaagtggtaaaactattctcgattttctaaagagcgacggcttcgccaataggaactttatgcagctgatccatgatgactctttaaccttcaaagaggatatacaaaaggcacaggtttccggacaaggggactcattgcacgaacatattgcgaatcttgctggttcgccagccatcaaaaagggcatactccagacagtcaaagtagtggatgagctagttaaggtcatgggacgtcacaaaccggaaaacattgtaatcgagatggcacgcgaaaatcaaacgactcagaaggggcaaaaaaacagtcgagagcggatgaagagaatagaagagggtattaaagaactgggcagccagatcttaaaggagcatcctgtggaaaatacccaattgcagaacgagaaactttacctctattacctacaaaatggaagggacatgtatgttgatcaggaactggacataaaccgtttatctgattacgacgtcgatgccattgtaccccaatcctttttgaaggacgattcaatcgacaataaagtgcttacacgctcggataagaaccgagggaaaagtgacaatgttccaagcgaggaagtcgtaaagaaaatgaagaactattggcggcagctcctaaatgcgaaactgataacgcaaagaaagttcgataacttaactaaagctgagaggggtggcttgtctgaacttgacaaggccggatttattaaacgtcagctcgtggaaacccgccaaatcacaaagcatgttgcacagatactagattcccgaatgaatacgaaatacgacgagaacgataagctgattcgggaagtcaaagtaatcactttaaagtcaaaattggtgtcggacttcagaaaggattttcaattctataaagttagggagataaataactaccaccatgcgcacgacgcttatcttaatgccgtcgtagggaccgcactcattaagaaatacccgaagctagaaagtgagtttgtgtatggtgattacaaagtttatgacgtccgtaagatgatcgcgaaaagcgaacaggagataggcaaggctacagccaaatacttcttttattctaacattatgaatttctttaagacggaaatcactctggcaaacggagagatacgcaaacgacctttaattgaaaccaatggggagacaggtgaaatcgtatgggataagggccgggacttcgcgacggtgagaaaagttttgtccatgccccaagtcaacatagtaaagaaaactgaggtgcagaccggagggttttcaaaggaatcgattcttccaaaaaggaatagtgataagctcatcgctcgtaaaaaggactgggacccgaaaaagtacggtggcttcgatagccctacagttgcctattctgtcctagtagtggcaaaagttgagaagggaaaatccaagaaactgaagtcagtcaaagaattattggggataacgattatggagcgctcgtcttttgaaaagaaccccatcgacttccttgaggcgaaaggttacaaggaagtaaaaaaggatctcataattaaactaccaaagtatagtctgtttgagttagaaaatggccgaaaacggatgttggctagcgccggagagcttcaaaaggggaacgaactcgcactaccgtctaaatacgtgaatttcctgtatttagcgtcccattacgagaagttgaaaggttcacctgaagataacgaacagaagcaactttttgttgagcagcacaaacattatctcgacgaaatcatagagcaaatttcggaattcagtaagagagtcatcctagctgatgccaatctggacaaagtattaagcgcatacaacaagcacagggataaacccatacgtgagcaggcggaaaatattatccatttgtttactcttaccaacctcggcgctccagccgcattcaagtattttgacacaacgatagatcgcaaacgatacacttctaccaaggaggtgctagacgcgacactgattcaccaatccatcacgggattatatgaaactcggatagatttgtcacagcttgggggtgacaactcaaagaaaaggtcactggaggacaacgaaacggaaatcaaagtctccagagacacctggaacactaagaacatgcggtccctggaaccgccacgaagcaagaaacggatacat

SEQ ID NO: 231 - DNA, 5241 bp, Artificial Sequence
  chemically synthesized
atgcccaaaaagaagaggaaagtcagctcttgcaataccaaaaaacccaatctggatgcggagttggaccagttgctgcaaggtcactatatcaaggggtatcccaagcaatatacctattttctcgaagatgggaaggtaaaagtctctcggcccgagggcgtaaagattattccaccccaatcagaccgccaaaagatagttcttcaggcacataaccttgcccatacggggcgcgaggctacgctccttaagatcgcgaatctttattggtggcccaatatgcgaaaagacgtagtcaagcagcttggacgatgtcaacagtgtcttattacgaatgctagtaataaggcatctgggcctattcttagacccgaccggcctcaaaagccgtttgataagttcttcatcgactatattggaccattgccgcccagccagggttatctttatgtgttggtggtggtagacggtatgactggattcacatggctgtatcccacaaaggcgccgagcacgtccgctactgtaaaaagtctgaatgttctcacctccatagccatacctaaggttatccattccgaccaaggcgcggcgttcaccagtagtacctttgcggagtgggcaaaggagcggggtatccatttggagttctctacaccataccacccacagtcaggctcaaaggttgaacgaaagaatagcgatattaagaggctcctcacgaagctgctcgtgggacgaccaacaaaatggtacgatttgcttccggtcgtacagttggcactgaacaatacctacagcccggttctgaaatatacgccgcatcagcttctgttcggaatcgacagtaatacaccttttgccaaccaggacacactggatcttactagagaggaggaactgagtcttctgcaggagattcgcacttcactttaccatccgtctactccccctgcttcatcaagatcatggagtgggggcgggggaagcggcggtggaggtagtggagggggaggatcagataaaaagtattctattggtttagccatcggcactaattccgttggatgggctgtcataaccgatgaatacaaagtaccttcaaagaaatttaaggtgttggggaacacagaccgtcattcgattaaaaagaatcttatcggtgccctcctattcgatagtggcgaaacggcagaggcgactcgcctgaaacgaaccgctcggagaaggtatacacgtcgcaagaaccgaatatgttacttacaagaaatttttagcaatgagatggccaaagttgacgattctttctttcaccgtttggaagagtccttccttgtcgaagaggacaagaaacatgaacggcaccccatctttggaaacatagtagatgaggtggcatatcatgaaaagtacccaacgatttatcacctcagaaaaaagctagttgactcaactgataaagcggacctgaggttaatctacttggctcttgcccatatgataaagttccgtgggcactttctcattgagggtgatctaaatccggacaactcggatgtcgacaaactgttcatccagttagtacaaacctataatcagttgtttgaagagaaccctataaatgcaagtggcgtggatgcgaaggctattcttagcgcccgcctctctaaatcccgacggctagaaaacctgatcgcacaattacccggagagaagaaaaatgggttgttcggtaaccttatagcgctctcactaggcctgacaccaaattttaagtcgaacttcgacttagctgaagatgccaaattgcagcttagtaaggacacgtacgatgacgatctcgacaatctactggcacaaattggagatcagtatgcggacttatttttggctgccaaaaaccttagcgatgcaatcctcctatctgacatactgagagttaatactgagattaccaaggcgccgttatccgcttcaatgatcaaaaggtacgatgaacatcaccaagacttgacacttctcaaggccctagtccgtcagcaactgcctgagaaatataaggaaatattctttgatcagtcgaaaaacgggtacgcaggttatattgacggcggagcgagtcaagaggaattctacaagtttatcaaacccatattagagaagatggatgggacggaagagttgcttgtaaaactcaatcgcgaagatctactgcgaaagcagcggactttcgacaacggtagcattccacatcaaatccacttaggcgaattgcatgctatacttagaaggcaggaggatttttatccgttcctcaaagacaatcgtgaaaagattgagaaaatcctaacctttcgcataccttactatgtgggacccctggcccgagggaactctcggttcgcatggatgacaagaaagtccgaagaaacgattactccatggaattttgaggaagttgtcgataaaggtgcgtcagctcaatcgttcatcgagaggatgaccaactttgacaagaatttaccgaacgaaaaagtattgcctaagcacagtttactttacgagtatttcacagtgtacaatgaactcacgaaagttaagtatgtcactgagggcatgcgtaaacccgcctttctaagcggagaacagaagaaagcaatagtagatctgttattcaagaccaaccgcaaagtgacagttaagcaattgaaagaggactactttaagaaaattgaatgcttcgattctgtcgagatctccggggtagaagatcgatttaatgcgtcacttggtacgtatcatgacctcctaaagataattaaagataaggacttcctggataacgaagagaatgaagatatcttagaagatatagtgttgactcttaccctctttgaagatcgggaaatgattgaggaaagactaaaaacatacgctcacctgttcgacgataaggttatgaaacagttaaagaggcgtcgctatacgggctggggacgattgtcgcggaaacttatcaacgggataagagacaagcaaagtggtaaaactattctcgattttctaaagagcgacggcttcgccaataggaactttatgcagctgatccatgatgactctttaaccttcaaagaggatatacaaaaggcacaggtttccggacaaggggactcattgcacgaacatattgcgaatcttgctggttcgccagccatcaaaaagggcatactccagacagtcaaagtagtggatgagctagttaaggtcatgggacgtcacaaaccggaaaacattgtaatcgagatggcacgcgaaaatcaaacgactcagaaggggcaaaaaaacagtcgagagcggatgaagagaatagaagagggtattaaagaactgggcagccagatcttaaaggagcatcctgtggaaaatacccaattgcagaacgagaaactttacctctattacctacaaaatggaagggacatgtatgttgatcaggaactggacataaaccgtttatctgattacgacgtcgatgccattgtaccccaatcctttttgaaggacgattcaatcgacaataaagtgcttacacgctcggataagaaccgagggaaaagtgacaatgttccaagcgaggaagtcgtaaagaaaatgaagaactattggcggcagctcctaaatgcgaaactgataacgcaaagaaagttcgataacttaactaaagctgagaggggtggcttgtctgaacttgacaaggccggatttattaaacgtcagctcgtggaaacccgccaaatcacaaagcatgttgcacagatactagattcccgaatgaatacgaaatacgacgagaacgataagctgattcgggaagtcaaagtaatcactttaaagtcaaaattggtgtcggacttcagaaaggattttcaattctataaagttagggagataaataactaccaccatgcgcacgacgcttatcttaatgccgtcgtagggaccgcactcattaagaaatacccgaagctagaaagtgagtttgtgtatggtgattacaaagtttatgacgtccgtaagatgatcgcgaaaagcgaacaggagataggcaaggctacagccaaatacttcttttattctaacattatgaatttctttaagacggaaatcactctggcaaacggagagatacgcaaacgacctttaattgaaaccaatggggagacaggtgaaatcgtatgggataagggccgggacttcgcgacggtgagaaaagttttgtccatgccccaagtcaacatagtaaagaaaactgaggtgcagaccggagggttttcaaaggaatcgattcttccaaaaaggaatagtgataagctcatcgctcgtaaaaaggactgggacccgaaaaagtacggtggcttcgatagccctacagttgcctattctgtcctagtagtggcaaaagttgagaagggaaaatccaagaaactgaagtcagtcaaagaattattggggataacgattatggagcgctcgtcttttgaaaagaaccccatcgacttccttgaggcgaaaggttacaaggaagtaaaaaaggatctcataattaaactaccaaagtatagtctgtttgagttagaaaatggccgaaaacggatgttggctagcgccggagagcttcaaaaggggaacgaactcgcactaccgtctaaatacgtgaatttcctgtatttagcgtcccattacgagaagttgaaaggttcacctgaagataacgaacagaagcaactttttgttgagcagcacaaacattatctcgacgaaatcatagagcaaatttcggaattcagtaagagagtcatcctagctgatgccaatctggacaaagtattaagcgcatacaacaagcacagggataaacccatacgtgagcaggcggaaaatattatccatttgtttactcttaccaacctcggcgctccagccgcattcaagtattttgacacaacgatagatcgcaaacgatacacttctaccaaggaggtgctagacgcgacactgattcaccaatccatcacgggattatatgaaactcggatagatttgtcacagcttgggggtgacaactcaaagaaaaggtcactggaggacaacgaaacggaaatcaaagtctccagagacacctggaacactaagaacatgcggtccctggaaccgccacgaagcaagaaacggatacat

SEQ ID NO: 232 - DNA, 5124 bp, Artificial Sequence
  chemically synthesized
atgcccaaaaagaagaggaaagtcagctctgggtctaccggagtgttctgggtagaaaacatccaggaagctcaagatgagcacgagaactggcacacctcccctaagatacttgccaggaactacaagatacctctcacggtggcgaaacagatcacccaggagtgcccacactgcaccaagcaaggttccggacctgctggttgtgtaatgaggtcaccaaaccattggcaggccgattgtacgcacctggataataagatcatcctgactttcgttgagagtaattctggatacatacacgcgaccctgctgagcaaggaaaacgccttgtgcacatctctggcaatcttggagtgggctagattgtttagcccaaaatctcttcacacagacaatggcacaaattttgtggccgaaccagttgtgaacttgctgaaattccttaagatcgcgcatacgactggtatcccttatcatcctgaatcacaagggatcgttgagagagctaacagaacactcaaagaaaagattcagagccatcgcgataacacccaaacacttgaagcagcactccagttggcacttataacttgtaacaaggggcgagaatccatgggggggcagactccgtgggaagtatttattaccaaccaggcccaagtaattcatgaaaaacttttgttgcagcaggctcagagttcaaagaaattctgcttttataaaataccgggggagcacgactggaaggggccaacacgggtattgtggaagggcgatggagcggtagtggttaatgatgagggaaaagggatcatcgctgtgccgcttactagaacaaagctccttattaagcctaacgggggcgggggaagcggcggtggaggtagtggagggggaggatcagataaaaagtattctattggtttagccatcggcactaattccgttggatgggctgtcataaccgatgaatacaaagtaccttcaaagaaatttaaggtgttggggaacacagaccgtcattcgattaaaaagaatcttatcggtgccctcctattcgatagtggcgaaacggcagaggcgactcgcctgaaacgaaccgctcggagaaggtatacacgtcgcaagaaccgaatatgttacttacaagaaatttttagcaatgagatggccaaagttgacgattctttctttcaccgtttggaagagtccttccttgtcgaagaggacaagaaacatgaacggcaccccatctttggaaacatagtagatgaggtggcatatcatgaaaagtacccaacgatttatcacctcagaaaaaagctagttgactcaactgataaagcggacctgaggttaatctacttggctcttgcccatatgataaagttccgtgggcactttctcattgagggtgatctaaatccggacaactcggatgtcgacaaactgttcatccagttagtacaaacctataatcagttgtttgaagagaaccctataaatgcaagtggcgtggatgcgaaggctattcttagcgcccgcctctctaaatcccgacggctagaaaacctgatcgcacaattacccggagagaagaaaaatgggttgttcggtaaccttatagcgctctcactaggcctgacaccaaattttaagtcgaacttcgacttagctgaagatgccaaattgcagcttagtaaggacacgtacgatgacgatctcgacaatctactggcacaaattggagatcagtatgcggacttatttttggctgccaaaaaccttagcgatgcaatcctcctatctgacatactgagagttaatactgagattaccaaggcgccgttatccgcttcaatgatcaaaaggtacgatgaacatcaccaagacttgacacttctcaaggccctagtccgtcagcaactgcctgagaaatataaggaaatattctttgatcagtcgaaaaacgggtacgcaggttatattgacggcggagcgagtcaagaggaattctacaagtttatcaaacccatattagagaagatggatgggacggaagagttgcttgtaaaactcaatcgcgaagatctactgcgaaagcagcggactttcgacaacggtagcattccacatcaaatccacttaggcgaattgcatgctatacttagaaggcaggaggatttttatccgttcctcaaagacaatcgtgaaaagattgagaaaatcctaacctttcgcataccttactatgtgggacccctggcccgagggaactctcggttcgcatggatgacaagaaagtccgaagaaacgattactccatggaattttgaggaagttgtcgataaaggtgcgtcagctcaatcgttcatcgagaggatgaccaactttgacaagaatttaccgaacgaaaaagtattgcctaagcacagtttactttacgagtatttcacagtgtacaatgaactcacgaaagttaagtatgtcactgagggcatgcgtaaacccgcctttctaagcggagaacagaagaaagcaatagtagatctgttattcaagaccaaccgcaaagtgacagttaagcaattgaaagaggactactttaagaaaattgaatgcttcgattctgtcgagatctccggggtagaagatcgatttaatgcgtcacttggtacgtatcatgacctcctaaagataattaaagataaggacttcctggataacgaagagaatgaagatatcttagaagatatagtgttgactcttaccctctttgaagatcgggaaatgattgaggaaagactaaaaacatacgctcacctgttcgacgataaggttatgaaacagttaaagaggcgtcgctatacgggctggggacgattgtcgcggaaacttatcaacgggataagagacaagcaaagtggtaaaactattctcgattttctaaagagcgacggcttcgccaataggaactttatgcagctgatccatgatgactctttaaccttcaaagaggatatacaaaaggcacaggtttccggacaaggggactcattgcacgaacatattgcgaatcttgctggttcgccagccatcaaaaagggcatactccagacagtcaaagtagtggatgagctagttaaggtcatgggacgtcacaaaccggaaaacattgtaatcgagatggcacgcgaaaatcaaacgactcagaaggggcaaaaaaacagtcgagagcggatgaagagaatagaagagggtattaaagaactgggcagccagatcttaaaggagcatcctgtggaaaatacccaattgcagaacgagaaactttacctctattacctacaaaatggaagggacatgtatgttgatcaggaactggacataaaccgtttatctgattacgacgtcgatgccattgtaccccaatcctttttgaaggacgattcaatcgacaataaagtgcttacacgctcggataagaaccgagggaaaagtgacaatgttccaagcgaggaagtcgtaaagaaaatgaagaactattggcggcagctcctaaatgcgaaactgataacgcaaagaaagttcgataacttaactaaagctgagaggggtggcttgtctgaacttgacaaggccggatttattaaacgtcagctcgtggaaacccgccaaatcacaaagcatgttgcacagatactagattcccgaatgaatacgaaatacgacgagaacgataagctgattcgggaagtcaaagtaatcactttaaagtcaaaattggtgtcggacttcagaaaggattttcaattctataaagttagggagataaataactaccaccatgcgcacgacgcttatcttaatgccgtcgtagggaccgcactcattaagaaatacccgaagctagaaagtgagtttgtgtatggtgattacaaagtttatgacgtccgtaagatgatcgcgaaaagcgaacaggagataggcaaggctacagccaaatacttcttttattctaacattatgaatttctttaagacggaaatcactctggcaaacggagagatacgcaaacgacctttaattgaaaccaatggggagacaggtgaaatcgtatgggataagggccgggacttcgcgacggtgagaaaagttttgtccatgccccaagtcaacatagtaaagaaaactgaggtgcagaccggagggttttcaaaggaatcgattcttccaaaaaggaatagtgataagctcatcgctcgtaaaaaggactgggacccgaaaaagtacggtggcttcgatagccctacagttgcctattctgtcctagtagtggcaaaagttgagaagggaaaatccaagaaactgaagtcagtcaaagaattattggggataacgattatggagcgctcgtcttttgaaaagaaccccatcgacttccttgaggcgaaaggttacaaggaagtaaaaaaggatctcataattaaactaccaaagtatagtctgtttgagttagaaaatggccgaaaacggatgttggctagcgccggagagcttcaaaaggggaacgaactcgcactaccgtctaaatacgtgaatttcctgtatttagcgtcccattacgagaagttgaaaggttcacctgaagataacgaacagaagcaactttttgttgagcagcacaaacattatctcgacgaaatcatagagcaaatttcggaattcagtaagagagtcatcctagctgatgccaatctggacaaagtattaagcgcatacaacaagcacagggataaacccatacgtgagcaggcggaaaatattatccatttgtttactcttaccaacctcggcgctccagccgcattcaagtattttgacacaacgatagatcgcaaacgatacacttctaccaaggaggtgctagacgcgacactgattcaccaatccatcacgggattatatgaaactcggatagatttgtcacagcttgggggtgacaactcaaagaaaaggtcactggaggacaacgaaacggaaatcaaagtctccagagacacctggaacactaagaacatgcggtccctggaaccgccacgaagcaagaaacggatacat

SEQ ID NO: 233 - DNA, 4968 bp, Artificial Sequence
  chemically synthesized
atgcccaaaaagaagaggaaagtcagctctgggtctaccggagtgttctgggtagaaaacatccaggaagctcaagatgagcacgagaactggcacacctcccctaagatacttgccaggaactacaagatacctctcacggtggcgaaacagatcacccaggagtgcccacactgcaccaagcaaggttccggacctgctggttgtgtaatgaggtcaccaaaccattggcaggccgattgtacgcacctggataataagatcatcctgactttcgttgagagtaattctggatacatacacgcgaccctgctgagcaaggaaaacgccttgtgcacatctctggcaatcttggagtgggctagattgtttagcccaaaatctcttcacacagacaatggcacaaattttgtggccgaaccagttgtgaacttgctgaaattccttaagatcgcgcatacgactggtatcccttatcatcctgaatcacaagggatcgttgagagagctaacagaacactcaaagaaaagattcagagccatcgcgataacacccaaacacttgaagcagcactccagttggcacttataacttgtaacaaggggcgagaatccatgggggggcagactccgtgggaagtatttattaccaaccaggcccaagtaattcatgaaaaacttttgttgcagcaggctcagagttcagggggcgggggaagcggcggtggaggtagtggagggggaggatcagataaaaagtattctattggtttagccatcggcactaattccgttggatgggctgtcataaccgatgaatacaaagtaccttcaaagaaatttaaggtgttggggaacacagaccgtcattcgattaaaaagaatcttatcggtgccctcctattcgatagtggcgaaacggcagaggcgactcgcctgaaacgaaccgctcggagaaggtatacacgtcgcaagaaccgaatatgttacttacaagaaatttttagcaatgagatggccaaagttgacgattctttctttcaccgtttggaagagtccttccttgtcgaagaggacaagaaacatgaacggcaccccatctttggaaacatagtagatgaggtggcatatcatgaaaagtacccaacgatttatcacctcagaaaaaagctagttgactcaactgataaagcggacctgaggttaatctacttggctcttgcccatatgataaagttccgtgggcactttctcattgagggtgatctaaatccggacaactcggatgtcgacaaactgttcatccagttagtacaaacctataatcagttgtttgaagagaaccctataaatgcaagtggcgtggatgcgaaggctattcttagcgcccgcctctctaaatcccgacggctagaaaacctgatcgcacaattacccggagagaagaaaaatgggttgttcggtaaccttatagcgctctcactaggcctgacaccaaattttaagtcgaacttcgacttagctgaagatgccaaattgcagcttagtaaggacacgtacgatgacgatctcgacaatctactggcacaaattggagatcagtatgcggacttatttttggctgccaaaaaccttagcgatgcaatcctcctatctgacatactgagagttaatactgagattaccaaggcgccgttatccgcttcaatgatcaaaaggtacgatgaacatcaccaagacttgacacttctcaaggccctagtccgtcagcaactgcctgagaaatataaggaaatattctttgatcagtcgaaaaacgggtacgcaggttatattgacggcggagcgagtcaagaggaattctacaagtttatcaaacccatattagagaagatggatgggacggaagagttgcttgtaaaactcaatcgcgaagatctactgcgaaagcagcggactttcgacaacggtagcattccacatcaaatccacttaggcgaattgcatgctatacttagaaggcaggaggatttttatccgttcctcaaagacaatcgtgaaaagattgagaaaatcctaacctttcgcataccttactatgtgggacccctggcccgagggaactctcggttcgcatggatgacaagaaagtccgaagaaacgattactccatggaattttgaggaagttgtcgataaaggtgcgtcagctcaatcgttcatcgagaggatgaccaactttgacaagaatttaccgaacgaaaaagtattgcctaagcacagtttactttacgagtatttcacagtgtacaatgaactcacgaaagttaagtatgtcactgagggcatgcgtaaacccgcctttctaagcggagaacagaagaaagcaatagtagatctgttattcaagaccaaccgcaaagtgacagttaagcaattgaaagaggactactttaagaaaattgaatgcttcgattctgtcgagatctccggggtagaagatcgatttaatgcgtcacttggtacgtatcatgacctcctaaagataattaaagataaggacttcctggataacgaagagaatgaagatatcttagaagatatagtgttgactcttaccctctttgaagatcgggaaatgattgaggaaagactaaaaacatacgctcacctgttcgacgataaggttatgaaacagttaaagaggcgtcgctatacgggctggggacgattgtcgcggaaacttatcaacgggataagagacaagcaaagtggtaaaactattctcgattttctaaagagcgacggcttcgccaataggaactttatgcagctgatccatgatgactctttaaccttcaaagaggatatacaaaaggcacaggtttccggacaaggggactcattgcacgaacatattgcgaatcttgctggttcgccagccatcaaaaagggcatactccagacagtcaaagtagtggatgagctagttaaggtcatgggacgtcacaaaccggaaaacattgtaatcgagatggcacgcgaaaatcaaacgactcagaaggggcaaaaaaacagtcgagagcggatgaagagaatagaagagggtattaaagaactgggcagccagatcttaaaggagcatcctgtggaaaatacccaattgcagaacgagaaactttacctctattacctacaaaatggaagggacatgtatgttgatcaggaactggacataaaccgtttatctgattacgacgtcgatgccattgtaccccaatcctttttgaaggacgattcaatcgacaataaagtgcttacacgctcggataagaaccgagggaaaagtgacaatgttccaagcgaggaagtcgtaaagaaaatgaagaactattggcggcagctcctaaatgcgaaactgataacgcaaagaaagttcgataacttaactaaagctgagaggggtggcttgtctgaacttgacaaggccggatttattaaacgtcagctcgtggaaacccgccaaatcacaaagcatgttgcacagatactagattcccgaatgaatacgaaatacgacgagaacgataagctgattcgggaagtcaaagtaatcactttaaagtcaaaattggtgtcggacttcagaaaggattttcaattctataaagttagggagataaataactaccaccatgcgcacgacgcttatcttaatgccgtcgtagggaccgcactcattaagaaatacccgaagctagaaagtgagtttgtgtatggtgattacaaagtttatgacgtccgtaagatgatcgcgaaaagcgaacaggagataggcaaggctacagccaaatacttcttttattctaacattatgaatttctttaagacggaaatcactctggcaaacggagagatacgcaaacgacctttaattgaaaccaatggggagacaggtgaaatcgtatgggataagggccgggacttcgcgacggtgagaaaagttttgtccatgccccaagtcaacatagtaaagaaaactgaggtgcagaccggagggttttcaaaggaatcgattcttccaaaaaggaatagtgataagctcatcgctcgtaaaaaggactgggacccgaaaaagtacggtggcttcgatagccctacagttgcctattctgtcctagtagtggcaaaagttgagaagggaaaatccaagaaactgaagtcagtcaaagaattattggggataacgattatggagcgctcgtcttttgaaaagaaccccatcgacttccttgaggcgaaaggttacaaggaagtaaaaaaggatctcataattaaactaccaaagtatagtctgtttgagttagaaaatggccgaaaacggatgttggctagcgccggagagcttcaaaaggggaacgaactcgcactaccgtctaaatacgtgaatttcctgtatttagcgtcccattacgagaagttgaaaggttcacctgaagataacgaacagaagcaactttttgttgagcagcacaaacattatctcgacgaaatcatagagcaaatttcggaattcagtaagagagtcatcctagctgatgccaatctggacaaagtattaagcgcatacaacaagcacagggataaacccatacgtgagcaggcggaaaatattatccatttgtttactcttaccaacctcggcgctccagccgcattcaagtattttgacacaacgatagatcgcaaacgatacacttctaccaaggaggtgctagacgcgacactgattcaccaatccatcacgggattatatgaaactcggatagatttgtcacagcttgggggtgacaactcaaagaaaaggtcactggaggacaacgaaacggaaatcaaagtctccagagacacctggaacactaagaacatgcggtccctggaaccgccacgaagcaagaaacggatacat

SEQ ID NO: 234 - DNA, 5517 bp, Artificial Sequence
  chemically synthesized
atgcccaaaaagaagaggaaagtcagctctatcgagaatagcagcccttatactagtgaacacttccattatacagtcacggatatcaaagaccttacgaagctgggggctatttatgataagaccaaaaagtattgggtatatcaaggcaagcccgttatgcccgatcagtttacttttgagcttctggatttcctccaccaacttactcatttgagtttctcaaagatgaaagcgctcctcgagagaagccacagcccctactatatgctcaatcgagaccgcacacttaagaacatcacggagacttgcaaggcatgcgctcaagtgaacgcttcaaagagcgcagtaaagcagggtacacgagtaaggggccatcggccaggaacacactgggaaatagatttcactgaaataaaaccgggtctctatgggtataagtatctgcttgtttttatagacacgttttccggatggatcgaggcatttccaacgaaaaaagaaactgccaaggtagtcacaaaaaaactcctggaagagatatttccacggtttggaatgccccaagttcttggcaccgacaatggaccggcgtttgtaagtaaggtgagccaaactgtcgcagacctcttgggaatagattggaagctgcactgtgcataccgcccccaatccagtgggcaagtcgaacgcatgaaccgcacaataaaagaaacgctgacgaaacttactctggcaacagggagccgcgactgggtgctgcttctccccctggcgctttaccgcgcccgcaatacccccggtccccatgggctcactccgtatgagatactctatggggcacccccgccgctcgtgaatttcccggacccggacatgacgcgagtgactaacagcccgtctttgcaggctcaccttcaagccctctatctcgttcagcacgaggtatggaggcctctcgcagccgcgtaccaagagcaattggatcgcccagtagtcccgcacccctatagggttggggacacagtatgggttaggagacatcaaaccaagaacttggaacctaggtggaaggggccctacaccgtcttgcttactacccctacggctctgaaagtagatggcatcgctgcttggatacatgccgcccatgttaaggccgcggatccgggaggaggtccatctagcagactgacttggagagtacaaaggagtcaaaacccgttgaagatcagactgacgagagaggccccagggggcgggggaagcggcggtggaggtagtggagggggaggatcagataaaaagtattctattggtttagccatcggcactaattccgttggatgggctgtcataaccgatgaatacaaagtaccttcaaagaaatttaaggtgttggggaacacagaccgtcattcgattaaaaagaatcttatcggtgccctcctattcgatagtggcgaaacggcagaggcgactcgcctgaaacgaaccgctcggagaaggtatacacgtcgcaagaaccgaatatgttacttacaagaaatttttagcaatgagatggccaaagttgacgattctttctttcaccgtttggaagagtccttccttgtcgaagaggacaagaaacatgaacggcaccccatctttggaaacatagtagatgaggtggcatatcatgaaaagtacccaacgatttatcacctcagaaaaaagctagttgactcaactgataaagcggacctgaggttaatctacttggctcttgcccatatgataaagttccgtgggcactttctcattgagggtgatctaaatccggacaactcggatgtcgacaaactgttcatccagttagtacaaacctataatcagttgtttgaagagaaccctataaatgcaagtggcgtggatgcgaaggctattcttagcgcccgcctctctaaatcccgacggctagaaaacctgatcgcacaattacccggagagaagaaaaatgggttgttcggtaaccttatagcgctctcactaggcctgacaccaaattttaagtcgaacttcgacttagctgaagatgccaaattgcagcttagtaaggacacgtacgatgacgatctcgacaatctactggcacaaattggagatcagtatgcggacttatttttggctgccaaaaaccttagcgatgcaatcctcctatctgacatactgagagttaatactgagattaccaaggcgccgttatccgcttcaatgatcaaaaggtacgatgaacatcaccaagacttgacacttctcaaggccctagtccgtcagcaactgcctgagaaatataaggaaatattctttgatcagtcgaaaaacgggtacgcaggttatattgacggcggagcgagtcaagaggaattctacaagtttatcaaacccatattagagaagatggatgggacggaagagttgcttgtaaaactcaatcgcgaagatctactgcgaaagcagcggactttcgacaacggtagcattccacatcaaatccacttaggcgaattgcatgctatacttagaaggcaggaggatttttatccgttcctcaaagacaatcgtgaaaagattgagaaaatcctaacctttcgcataccttactatgtgggacccctggcccgagggaactctcggttcgcatggatgacaagaaagtccgaagaaacgattactccatggaattttgaggaagttgtcgataaaggtgcgtcagctcaatcgttcatcgagaggatgaccaactttgacaagaatttaccgaacgaaaaagtattgcctaagcacagtttactttacgagtatttcacagtgtacaatgaactcacgaaagttaagtatgtcactgagggcatgcgtaaacccgcctttctaagcggagaacagaagaaagcaatagtagatctgttattcaagaccaaccgcaaagtgacagttaagcaattgaaagaggactactttaagaaaattgaatgcttcgattctgtcgagatctccggggtagaagatcgatttaatgcgtcacttggtacgtatcatgacctcctaaagataattaaagataaggacttcctggataacgaagagaatgaagatatcttagaagatatagtgttgactcttaccctctttgaagatcgggaaatgattgaggaaagactaaaaacatacgctcacctgttcgacgataaggttatgaaacagttaaagaggcgtcgctatacgggctggggacgattgtcgcggaaacttatcaacgggataagagacaagcaaagtggtaaaactattctcgattttctaaagagcgacggcttcgccaataggaactttatgcagctgatccatgatgactctttaaccttcaaagaggatatacaaaaggcacaggtttccggacaaggggactcattgcacgaacatattgcgaatcttgctggttcgccagccatcaaaaagggcatactccagacagtcaaagtagtggatgagctagttaaggtcatgggacgtcacaaaccggaaaacattgtaatcgagatggcacgcgaaaatcaaacgactcagaaggggcaaaaaaacagtcgagagcggatgaagagaatagaagagggtattaaagaactgggcagccagatcttaaaggagcatcctgtggaaaatacccaattgcagaacgagaaactttacctctattacctacaaaatggaagggacatgtatgttgatcaggaactggacataaaccgtttatctgattacgacgtcgatgccattgtaccccaatcctttttgaaggacgattcaatcgacaataaagtgcttacacgctcggataagaaccgagggaaaagtgacaatgttccaagcgaggaagtcgtaaagaaaatgaagaactattggcggcagctcctaaatgcgaaactgataacgcaaagaaagttcgataacttaactaaagctgagaggggtggcttgtctgaacttgacaaggccggatttattaaacgtcagctcgtggaaacccgccaaatcacaaagcatgttgcacagatactagattcccgaatgaatacgaaatacgacgagaacgataagctgattcgggaagtcaaagtaatcactttaaagtcaaaattggtgtcggacttcagaaaggattttcaattctataaagttagggagataaataactaccaccatgcgcacgacgcttatcttaatgccgtcgtagggaccgcactcattaagaaatacccgaagctagaaagtgagtttgtgtatggtgattacaaagtttatgacgtccgtaagatgatcgcgaaaagcgaacaggagataggcaaggctacagccaaatacttcttttattctaacattatgaatttctttaagacggaaatcactctggcaaacggagagatacgcaaacgacctttaattgaaaccaatggggagacaggtgaaatcgtatgggataagggccgggacttcgcgacggtgagaaaagttttgtccatgccccaagtcaacatagtaaagaaaactgaggtgcagaccggagggttttcaaaggaatcgattcttccaaaaaggaatagtgataagctcatcgctcgtaaaaaggactgggacccgaaaaagtacggtggcttcgatagccctacagttgcctattctgtcctagtagtggcaaaagttgagaagggaaaatccaagaaactgaagtcagtcaaagaattattggggataacgattatggagcgctcgtcttttgaaaagaaccccatcgacttccttgaggcgaaaggttacaaggaagtaaaaaaggatctcataattaaactaccaaagtatagtctgtttgagttagaaaatggccgaaaacggatgttggctagcgccggagagcttcaaaaggggaacgaactcgcactaccgtctaaatacgtgaatttcctgtatttagcgtcccattacgagaagttgaaaggttcacctgaagataacgaacagaagcaactttttgttgagcagcacaaacattatctcgacgaaatcatagagcaaatttcggaattcagtaagagagtcatcctagctgatgccaatctggacaaagtattaagcgcatacaacaagcacagggataaacccatacgtgagcaggcggaaaatattatccatttgtttactcttaccaacctcggcgctccagccgcattcaagtattttgacacaacgatagatcgcaaacgatacacttctaccaaggaggtgctagacgcgacactgattcaccaatccatcacgggattatatgaaactcggatagatttgtcacagcttgggggtgacaactcaaagaaaaggtcactggaggacaacgaaacggaaatcaaagtctccagagacacctggaacactaagaacatgcggtccctggaaccgccacgaagcaagaaacggatacat

SEQ ID NO: 235 - DNA, 5271 bp, Artificial Sequence
  chemically synthesized
atgcccaaaaagaagaggaaagtcagctctatcgagaatagcagcccttatactagtgaacacttccattatacagtcacggatatcaaagaccttacgaagctgggggctatttatgataagaccaaaaagtattgggtatatcaaggcaagcccgttatgcccgatcagtttacttttgagcttctggatttcctccaccaacttactcatttgagtttctcaaagatgaaagcgctcctcgagagaagccacagcccctactatatgctcaatcgagaccgcacacttaagaacatcacggagacttgcaaggcatgcgctcaagtgaacgcttcaaagagcgcagtaaagcagggtacacgagtaaggggccatcggccaggaacacactgggaaatagatttcactgaaataaaaccgggtctctatgggtataagtatctgcttgtttttatagacacgttttccggatggatcgaggcatttccaacgaaaaaagaaactgccaaggtagtcacaaaaaaactcctggaagagatatttccacggtttggaatgccccaagttcttggcaccgacaatggaccggcgtttgtaagtaaggtgagccaaactgtcgcagacctcttgggaatagattggaagctgcactgtgcataccgcccccaatccagtgggcaagtcgaacgcatgaaccgcacaataaaagaaacgctgacgaaacttactctggcaacagggagccgcgactgggtgctgcttctccccctggcgctttaccgcgcccgcaatacccccggtccccatgggctcactccgtatgagatactctatggggcacccccgccgctcgtgaatttcccggacccggacatgacgcgagtgactaacagcccgtctttgcaggctcaccttcaagccctctatctcgttcagcacgaggtatggaggcctctcgcagccgcgtaccaagagcaattggatcgcccagtagtcccgcaccccgggggcgggggaagcggcggtggaggtagtggagggggaggatcagataaaaagtattctattggtttagccatcggcactaattccgttggatgggctgtcataaccgatgaatacaaagtaccttcaaagaaatttaaggtgttggggaacacagaccgtcattcgattaaaaagaatcttatcggtgccctcctattcgatagtggcgaaacggcagaggcgactcgcctgaaacgaaccgctcggagaaggtatacacgtcgcaagaaccgaatatgttacttacaagaaatttttagcaatgagatggccaaagttgacgattctttctttcaccgtttggaagagtccttccttgtcgaagaggacaagaaacatgaacggcaccccatctttggaaacatagtagatgaggtggcatatcatgaaaagtacccaacgatttatcacctcagaaaaaagctagttgactcaactgataaagcggacctgaggttaatctacttggctcttgcccatatgataaagttccgtgggcactttctcattgagggtgatctaaatccggacaactcggatgtcgacaaactgttcatccagttagtacaaacctataatcagttgtttgaagagaaccctataaatgcaagtggcgtggatgcgaaggctattcttagcgcccgcctctctaaatcccgacggctagaaaacctgatcgcacaattacccggagagaagaaaaatgggttgttcggtaaccttatagcgctctcactaggcctgacaccaaattttaagtcgaacttcgacttagctgaagatgccaaattgcagcttagtaaggacacgtacgatgacgatctcgacaatctactggcacaaattggagatcagtatgcggacttatttttggctgccaaaaaccttagcgatgcaatcctcctatctgacatactgagagttaatactgagattaccaaggcgccgttatccgcttcaatgatcaaaaggtacgatgaacatcaccaagacttgacacttctcaaggccctagtccgtcagcaactgcctgagaaatataaggaaatattctttgatcagtcgaaaaacgggtacgcaggttatattgacggcggagcgagtcaagaggaattctacaagtttatcaaacccatattagagaagatggatgggacggaagagttgcttgtaaaactcaatcgcgaagatctactgcgaaagcagcggactttcgacaacggtagcattccacatcaaatccacttaggcgaattgcatgctatacttagaaggcaggaggatttttatccgttcctcaaagacaatcgtgaaaagattgagaaaatcctaacctttcgcataccttactatgtgggacccctggcccgagggaactctcggttcgcatggatgacaagaaagtccgaagaaacgattactccatggaattttgaggaagttgtcgataaaggtgcgtcagctcaatcgttcatcgagaggatgaccaactttgacaagaatttaccgaacgaaaaagtattgcctaagcacagtttactttacgagtatttcacagtgtacaatgaactcacgaaagttaagtatgtcactgagggcatgcgtaaacccgcctttctaagcggagaacagaagaaagcaatagtagatctgttattcaagaccaaccgcaaagtgacagttaagcaattgaaagaggactactttaagaaaattgaatgcttcgattctgtcgagatctccggggtagaagatcgatttaatgcgtcacttggtacgtatcatgacctcctaaagataattaaagataaggacttcctggataacgaagagaatgaagatatcttagaagatatagtgttgactcttaccctctttgaagatcgggaaatgattgaggaaagactaaaaacatacgctcacctgttcgacgataaggttatgaaacagttaaagaggcgtcgctatacgggctggggacgattgtcgcggaaacttatcaacgggataagagacaagcaaagtggtaaaactattctcgattttctaaagagcgacggcttcgccaataggaactttatgcagctgatccatgatgactctttaaccttcaaagaggatatacaaaaggcacaggtttccggacaaggggactcattgcacgaacatattgcgaatcttgctggttcgccagccatcaaaaagggcatactccagacagtcaaagtagtggatgagctagttaaggtcatgggacgtcacaaaccggaaaacattgtaatcgagatggcacgcgaaaatcaaacgactcagaaggggcaaaaaaacagtcgagagcggatgaagagaatagaagagggtattaaagaactgggcagccagatcttaaaggagcatcctgtggaaaatacccaattgcagaacgagaaactttacctctattacctacaaaatggaagggacatgtatgttgatcaggaactggacataaaccgtttatctgattacgacgtcgatgccattgtaccccaatcctttttgaaggacgattcaatcgacaataaagtgcttacacgctcggataagaaccgagggaaaagtgacaatgttccaagcgaggaagtcgtaaagaaaatgaagaactattggcggcagctcctaaatgcgaaactgataacgcaaagaaagttcgataacttaactaaagctgagaggggtggcttgtctgaacttgacaaggccggatttattaaacgtcagctcgtggaaacccgccaaatcacaaagcatgttgcacagatactagattcccgaatgaatacgaaatacgacgagaacgataagctgattcgggaagtcaaagtaatcactttaaagtcaaaattggtgtcggacttcagaaaggattttcaattctataaagttagggagataaataactaccaccatgcgcacgacgcttatcttaatgccgtcgtagggaccgcactcattaagaaatacccgaagctagaaagtgagtttgtgtatggtgattacaaagtttatgacgtccgtaagatgatcgcgaaaagcgaacaggagataggcaaggctacagccaaatacttcttttattctaacattatgaatttctttaagacggaaatcactctggcaaacggagagatacgcaaacgacctttaattgaaaccaatggggagacaggtgaaatcgtatgggataagggccgggacttcgcgacggtgagaaaagttttgtccatgccccaagtcaacatagtaaagaaaactgaggtgcagaccggagggttttcaaaggaatcgattcttccaaaaaggaatagtgataagctcatcgctcgtaaaaaggactgggacccgaaaaagtacggtggcttcgatagccctacagttgcctattctgtcctagtagtggcaaaagttgagaagggaaaatccaagaaactgaagtcagtcaaagaattattggggataacgattatggagcgctcgtcttttgaaaagaaccccatcgacttccttgaggcgaaaggttacaaggaagtaaaaaaggatctcataattaaactaccaaagtatagtctgtttgagttagaaaatggccgaaaacggatgttggctagcgccggagagcttcaaaaggggaacgaactcgcactaccgtctaaatacgtgaatttcctgtatttagcgtcccattacgagaagttgaaaggttcacctgaagataacgaacagaagcaactttttgttgagcagcacaaacattatctcgacgaaatcatagagcaaatttcggaattcagtaagagagtcatcctagctgatgccaatctggacaaagtattaagcgcatacaacaagcacagggataaacccatacgtgagcaggcggaaaatattatccatttgtttactcttaccaacctcggcgctccagccgcattcaagtattttgacacaacgatagatcgcaaacgatacacttctaccaaggaggtgctagacgcgacactgattcaccaatccatcacgggattatatgaaactcggatagatttgtcacagcttgggggtgacaactcaaagaaaaggtcactggaggacaacgaaacggaaatcaaagtctccagagacacctggaacactaagaacatgcggtccctggaaccgccacgaagcaagaaacggatacat

SEQ ID NO: 236 - DNA, 5247 bp, Artificial Sequence
  chemically synthesized
atgcccaaaaagaagaggaaagtcagctctttggagagtgctcaggaatctcacgcacttcaccatcagaatgctgccgcgttgagattccaattccatataactcgcgaacaagcgagagaaatcgtgaagttgtgccctaactgcccggactgggggcacgccccgcagctcggcgtaaaccccagagggcttaaaccaagggttctttggcagatggatgtgacccatgtgtccgagtttgggaagctgaaatatgtccacgttactgtggatacttactcacattttacattcgccactgctcgcacaggagaagctaccaaggatgtgctccaacacctggcacaaagctttgcgtacatgggaataccacagaaaattaaaactgacaacgcacctgcttatgtgagccgatccattcaggagtttttggcacgctggaagatcagtcatgtaacaggcattccgtataatccccagggtcaggcaattgtagaacgcactcaccaaaacatcaaggctcaactgaataagcttcagaaggctgggaaatactacacacctcatcatctcttggcacacgcactgtttgtcttgaaccacgtaaatatggacaatcagggtcacacagccgctgaacgacattgggggccgatctccgctgacccgaaacctatggttatgtggaaagatctgttgacgggaagctggaagggcccagacgttcttattactgcgggtcgcggctacgcttgtgtgttcccgcaagacgcggaaactcccatctgggttccagatcgctttattcgaccgttcactgagaggaaagaggccacacctaccccgggtactgccgagaagacacccccaagagatgagaaagatcaacaggagagcccaaagaatgagtctagcccccaccaaagagaggacggtttggcaacatccgccggagtcgatcttcggtcagggggtggcccggggggcgggggaagcggcggtggaggtagtggagggggaggatcagataaaaagtattctattggtttagccatcggcactaattccgttggatgggctgtcataaccgatgaatacaaagtaccttcaaagaaatttaaggtgttggggaacacagaccgtcattcgattaaaaagaatcttatcggtgccctcctattcgatagtggcgaaacggcagaggcgactcgcctgaaacgaaccgctcggagaaggtatacacgtcgcaagaaccgaatatgttacttacaagaaatttttagcaatgagatggccaaagttgacgattctttctttcaccgtttggaagagtccttccttgtcgaagaggacaagaaacatgaacggcaccccatctttggaaacatagtagatgaggtggcatatcatgaaaagtacccaacgatttatcacctcagaaaaaagctagttgactcaactgataaagcggacctgaggttaatctacttggctcttgcccatatgataaagttccgtgggcactttctcattgagggtgatctaaatccggacaactcggatgtcgacaaactgttcatccagttagtacaaacctataatcagttgtttgaagagaaccctataaatgcaagtggcgtggatgcgaaggctattcttagcgcccgcctctctaaatcccgacggctagaaaacctgatcgcacaattacccggagagaagaaaaatgggttgttcggtaaccttatagcgctctcactaggcctgacaccaaattttaagtcgaacttcgacttagctgaagatgccaaattgcagcttagtaaggacacgtacgatgacgatctcgacaatctactggcacaaattggagatcagtatgcggacttatttttggctgccaaaaaccttagcgatgcaatcctcctatctgacatactgagagttaatactgagattaccaaggcgccgttatccgcttcaatgatcaaaaggtacgatgaacatcaccaagacttgacacttctcaaggccctagtccgtcagcaactgcctgagaaatataaggaaatattctttgatcagtcgaaaaacgggtacgcaggttatattgacggcggagcgagtcaagaggaattctacaagtttatcaaacccatattagagaagatggatgggacggaagagttgcttgtaaaactcaatcgcgaagatctactgcgaaagcagcggactttcgacaacggtagcattccacatcaaatccacttaggcgaattgcatgctatacttagaaggcaggaggatttttatccgttcctcaaagacaatcgtgaaaagattgagaaaatcctaacctttcgcataccttactatgtgggacccctggcccgagggaactctcggttcgcatggatgacaagaaagtccgaagaaacgattactccatggaattttgaggaagttgtcgataaaggtgcgtcagctcaatcgttcatcgagaggatgaccaactttgacaagaatttaccgaacgaaaaagtattgcctaagcacagtttactttacgagtatttcacagtgtacaatgaactcacgaaagttaagtatgtcactgagggcatgcgtaaacccgcctttctaagcggagaacagaagaaagcaatagtagatctgttattcaagaccaaccgcaaagtgacagttaagcaattgaaagaggactactttaagaaaattgaatgcttcgattctgtcgagatctccggggtagaagatcgatttaatgcgtcacttggtacgtatcatgacctcctaaagataattaaagataaggacttcctggataacgaagagaatgaagatatcttagaagatatagtgttgactcttaccctctttgaagatcgggaaatgattgaggaaagactaaaaacatacgctcacctgttcgacgataaggttatgaaacagttaaagaggcgtcgctatacgggctggggacgattgtcgcggaaacttatcaacgggataagagacaagcaaagtggtaaaactattctcgattttctaaagagcgacggcttcgccaataggaactttatgcagctgatccatgatgactctttaaccttcaaagaggatatacaaaaggcacaggtttccggacaaggggactcattgcacgaacatattgcgaatcttgctggttcgccagccatcaaaaagggcatactccagacagtcaaagtagtggatgagctagttaaggtcatgggacgtcacaaaccggaaaacattgtaatcgagatggcacgcgaaaatcaaacgactcagaaggggcaaaaaaacagtcgagagcggatgaagagaatagaagagggtattaaagaactgggcagccagatcttaaaggagcatcctgtggaaaatacccaattgcagaacgagaaactttacctctattacctacaaaatggaagggacatgtatgttgatcaggaactggacataaaccgtttatctgattacgacgtcgatgccattgtaccccaatcctttttgaaggacgattcaatcgacaataaagtgcttacacgctcggataagaaccgagggaaaagtgacaatgttccaagcgaggaagtcgtaaagaaaatgaagaactattggcggcagctcctaaatgcgaaactgataacgcaaagaaagttcgataacttaactaaagctgagaggggtggcttgtctgaacttgacaaggccggatttattaaacgtcagctcgtggaaacccgccaaatcacaaagcatgttgcacagatactagattcccgaatgaatacgaaatacgacgagaacgataagctgattcgggaagtcaaagtaatcactttaaagtcaaaattggtgtcggacttcagaaaggattttcaattctataaagttagggagataaataactaccaccatgcgcacgacgcttatcttaatgccgtcgtagggaccgcactcattaagaaatacccgaagctagaaagtgagtttgtgtatggtgattacaaagtttatgacgtccgtaagatgatcgcgaaaagcgaacaggagataggcaaggctacagccaaatacttcttttattctaacattatgaatttctttaagacggaaatcactctggcaaacggagagatacgcaaacgacctttaattgaaaccaatggggagacaggtgaaatcgtatgggataagggccgggacttcgcgacggtgagaaaagttttgtccatgccccaagtcaacatagtaaagaaaactgaggtgcagaccggagggttttcaaaggaatcgattcttccaaaaaggaatagtgataagctcatcgctcgtaaaaaggactgggacccgaaaaagtacggtggcttcgatagccctacagttgcctattctgtcctagtagtggcaaaagttgagaagggaaaatccaagaaactgaagtcagtcaaagaattattggggataacgattatggagcgctcgtcttttgaaaagaaccccatcgacttccttgaggcgaaaggttacaaggaagtaaaaaaggatctcataattaaactaccaaagtatagtctgtttgagttagaaaatggccgaaaacggatgttggctagcgccggagagcttcaaaaggggaacgaactcgcactaccgtctaaatacgtgaatttcctgtatttagcgtcccattacgagaagttgaaaggttcacctgaagataacgaacagaagcaactttttgttgagcagcacaaacattatctcgacgaaatcatagagcaaatttcggaattcagtaagagagtcatcctagctgatgccaatctggacaaagtattaagcgcatacaacaagcacagggataaacccatacgtgagcaggcggaaaatattatccatttgtttactcttaccaacctcggcgctccagccgcattcaagtattttgacacaacgatagatcgcaaacgatacacttctaccaaggaggtgctagacgcgacactgattcaccaatccatcacgggattatatgaaactcggatagatttgtcacagcttgggggtgacaactcaaagaaaaggtcactggaggacaacgaaacggaaatcaaagtctccagagacacctggaacactaagaacatgcggtccctggaaccgccacgaagcaagaaacggatacat

SEQ ID NO: 237 - DNA, 4929 bp, Artificial Sequence
  chemically synthesized
atgcccaaaaagaagaggaaagtcagctctttggagagtgctcaggaatctcacgcacttcaccatcagaatgctgccgcgttgagattccaattccatataactcgcgaacaagcgagagaaatcgtgaagttgtgccctaactgcccggactgggggcacgccccgcagctcggcgtaaaccccagagggcttaaaccaagggttctttggcagatggatgtgacccatgtgtccgagtttgggaagctgaaatatgtccacgttactgtggatacttactcacattttacattcgccactgctcgcacaggagaagctaccaaggatgtgctccaacacctggcacaaagctttgcgtacatgggaataccacagaaaattaaaactgacaacgcacctgcttatgtgagccgatccattcaggagtttttggcacgctggaagatcagtcatgtaacaggcattccgtataatccccagggtcaggcaattgtagaacgcactcaccaaaacatcaaggctcaactgaataagcttcagaaggctgggaaatactacacacctcatcatctcttggcacacgcactgtttgtcttgaaccacgtaaatatggacaatcagggtcacacagccgctgaacgacattgggggccgatctccgctgggggcgggggaagcggcggtggaggtagtggagggggaggatcagataaaaagtattctattggtttagccatcggcactaattccgttggatgggctgtcataaccgatgaatacaaagtaccttcaaagaaatttaaggtgttggggaacacagaccgtcattcgattaaaaagaatcttatcggtgccctcctattcgatagtggcgaaacggcagaggcgactcgcctgaaacgaaccgctcggagaaggtatacacgtcgcaagaaccgaatatgttacttacaagaaatttttagcaatgagatggccaaagttgacgattctttctttcaccgtttggaagagtccttccttgtcgaagaggacaagaaacatgaacggcaccccatctttggaaacatagtagatgaggtggcatatcatgaaaagtacccaacgatttatcacctcagaaaaaagctagttgactcaactgataaagcggacctgaggttaatctacttggctcttgcccatatgataaagttccgtgggcactttctcattgagggtgatctaaatccggacaactcggatgtcgacaaactgttcatccagttagtacaaacctataatcagttgtttgaagagaaccctataaatgcaagtggcgtggatgcgaaggctattcttagcgcccgcctctctaaatcccgacggctagaaaacctgatcgcacaattacccggagagaagaaaaatgggttgttcggtaaccttatagcgctctcactaggcctgacaccaaattttaagtcgaacttcgacttagctgaagatgccaaattgcagcttagtaaggacacgtacgatgacgatctcgacaatctactggcacaaattggagatcagtatgcggacttatttttggctgccaaaaaccttagcgatgcaatcctcctatctgacatactgagagttaatactgagattaccaaggcgccgttatccgcttcaatgatcaaaaggtacgatgaacatcaccaagacttgacacttctcaaggccctagtccgtcagcaactgcctgagaaatataaggaaatattctttgatcagtcgaaaaacgggtacgcaggttatattgacggcggagcgagtcaagaggaattctacaagtttatcaaacccatattagagaagatggatgggacggaagagttgcttgtaaaactcaatcgcgaagatctactgcgaaagcagcggactttcgacaacggtagcattccacatcaaatccacttaggcgaattgcatgctatacttagaaggcaggaggatttttatccgttcctcaaagacaatcgtgaaaagattgagaaaatcctaacctttcgcataccttactatgtgggacccctggcccgagggaactctcggttcgcatggatgacaagaaagtccgaagaaacgattactccatggaattttgaggaagttgtcgataaaggtgcgtcagctcaatcgttcatcgagaggatgaccaactttgacaagaatttaccgaacgaaaaagtattgcctaagcacagtttactttacgagtatttcacagtgtacaatgaactcacgaaagttaagtatgtcactgagggcatgcgtaaacccgcctttctaagcggagaacagaagaaagcaatagtagatctgttattcaagaccaaccgcaaagtgacagttaagcaattgaaagaggactactttaagaaaattgaatgcttcgattctgtcgagatctccggggtagaagatcgatttaatgcgtcacttggtacgtatcatgacctcctaaagataattaaagataaggacttcctggataacgaagagaatgaagatatcttagaagatatagtgttgactcttaccctctttgaagatcgggaaatgattgaggaaagactaaaaacatacgctcacctgttcgacgataaggttatgaaacagttaaagaggcgtcgctatacgggctggggacgattgtcgcggaaacttatcaacgggataagagacaagcaaagtggtaaaactattctcgattttctaaagagcgacggcttcgccaataggaactttatgcagctgatccatgatgactctttaaccttcaaagaggatatacaaaaggcacaggtttccggacaaggggactcattgcacgaacatattgcgaatcttgctggttcgccagccatcaaaaagggcatactccagacagtcaaagtagtggatgagctagttaaggtcatgggacgtcacaaaccggaaaacattgtaatcgagatggcacgcgaaaatcaaacgactcagaaggggcaaaaaaacagtcgagagcggatgaagagaatagaagagggtattaaagaactgggcagccagatcttaaaggagcatcctgtggaaaatacccaattgcagaacgagaaactttacctctattacctacaaaatggaagggacatgtatgttgatcaggaactggacataaaccgtttatctgattacgacgtcgatgccattgtaccccaatcctttttgaaggacgattcaatcgacaataaagtgcttacacgctcggataagaaccgagggaaaagtgacaatgttccaagcgaggaagtcgtaaagaaaatgaagaactattggcggcagctcctaaatgcgaaactgataacgcaaagaaagttcgataacttaactaaagctgagaggggtggcttgtctgaacttgacaaggccggatttattaaacgtcagctcgtggaaacccgccaaatcacaaagcatgttgcacagatactagattcccgaatgaatacgaaatacgacgagaacgataagctgattcgggaagtcaaagtaatcactttaaagtcaaaattggtgtcggacttcagaaaggattttcaattctataaagttagggagataaataactaccaccatgcgcacgacgcttatcttaatgccgtcgtagggaccgcactcattaagaaatacccgaagctagaaagtgagtttgtgtatggtgattacaaagtttatgacgtccgtaagatgatcgcgaaaagcgaacaggagataggcaaggctacagccaaatacttcttttattctaacattatgaatttctttaagacggaaatcactctggcaaacggagagatacgcaaacgacctttaattgaaaccaatggggagacaggtgaaatcgtatgggataagggccgggacttcgcgacggtgagaaaagttttgtccatgccccaagtcaacatagtaaagaaaactgaggtgcagaccggagggttttcaaaggaatcgattcttccaaaaaggaatagtgataagctcatcgctcgtaaaaaggactgggacccgaaaaagtacggtggcttcgatagccctacagttgcctattctgtcctagtagtggcaaaagttgagaagggaaaatccaagaaactgaagtcagtcaaagaattattggggataacgattatggagcgctcgtcttttgaaaagaaccccatcgacttccttgaggcgaaaggttacaaggaagtaaaaaaggatctcataattaaactaccaaagtatagtctgtttgagttagaaaatggccgaaaacggatgttggctagcgccggagagcttcaaaaggggaacgaactcgcactaccgtctaaatacgtgaatttcctgtatttagcgtcccattacgagaagttgaaaggttcacctgaagataacgaacagaagcaactttttgttgagcagcacaaacattatctcgacgaaatcatagagcaaatttcggaattcagtaagagagtcatcctagctgatgccaatctggacaaagtattaagcgcatacaacaagcacagggataaacccatacgtgagcaggcggaaaatattatccatttgtttactcttaccaacctcggcgctccagccgcattcaagtattttgacacaacgatagatcgcaaacgatacacttctaccaaggaggtgctagacgcgacactgattcaccaatccatcacgggattatatgaaactcggatagatttgtcacagcttgggggtgacaactcaaagaaaaggtcactggaggacaacgaaacggaaatcaaagtctccagagacacctggaacactaagaacatgcggtccctggaaccgccacgaagcaagaaacggatacat

SEQ ID NO: 238 - DNA, 5433 bp, Artificial Sequence
  chemically synthesized
atgcccaaaaagaagaggaaagtcagctctgtcttgaaaaagggcgatgcgctggcgagcacggatcttgtaatggaatattctgaaactgacgaaaagtttacagcaggagctgaactgcacgatggagtgtttatgcggggcgatcttattgtccctccactcgaaatgctccacgccatactcttggcaatacacggggtgagtcatacacataagggtgggataatgtcatacttttctaagttttggacccaccctaaagctagtcagacgatcgatctcatcctcggtcactgccaaatctgccttaaacataacccaaagtataagtccaggctccaaggacaccgccctttgcccagtcgacccttcgcacacttgcaaattgattttgtccaaatgtgcgtaaaaaagcctatgtatgcacttgttatcattgatgtatttagtaaatggccagagataattccttgtaataaagaagacgcaaaaactgtatgcgatattctcatgaaggacataatccctagatggggcctgcctgatcaaattgacagcgatcaaggcacgcatttcacagcaaagataagccaagaactgacccactccattggagtggcatggaaactccactgtccaggtcacccccggagttcagggatcgttgagcgcacgaaccgaacattgaaatctaagattatcaaggcccaggagcagcttcaactgagtaaatggactgaggttttgccctacgtgctgctcgaaatgagagcaactcccaagaagcacggacttagccctcatgaaatcgtaatggggcgacccatgaaaacaacctacctttccgatatgtcccctctgtgggccactgacactttggtgacttacatgaacaagttgacacgacaactctctgcctaccaccagcaagttgtagaccagtggccctccactagcttgccgcccggacctgaacccggatcttggtgtatgctcagaaatccgaaaaagtccagcaactgggaaggtccctttctcatcctcttgtctacgcctacagcagttaaggttgagggaaggccaacgtggattcatctcgatcattgtaaattgctgcgcagttcactgtccagctctttgggtggcccggtaaatcaactgttgagcgggggcgggggaagcggcggtggaggtagtggagggggaggatcagataaaaagtattctattggtttagccatcggcactaattccgttggatgggctgtcataaccgatgaatacaaagtaccttcaaagaaatttaaggtgttggggaacacagaccgtcattcgattaaaaagaatcttatcggtgccctcctattcgatagtggcgaaacggcagaggcgactcgcctgaaacgaaccgctcggagaaggtatacacgtcgcaagaaccgaatatgttacttacaagaaatttttagcaatgagatggccaaagttgacgattctttctttcaccgtttggaagagtccttccttgtcgaagaggacaagaaacatgaacggcaccccatctttggaaacatagtagatgaggtggcatatcatgaaaagtacccaacgatttatcacctcagaaaaaagctagttgactcaactgataaagcggacctgaggttaatctacttggctcttgcccatatgataaagttccgtgggcactttctcattgagggtgatctaaatccggacaactcggatgtcgacaaactgttcatccagttagtacaaacctataatcagttgtttgaagagaaccctataaatgcaagtggcgtggatgcgaaggctattcttagcgcccgcctctctaaatcccgacggctagaaaacctgatcgcacaattacccggagagaagaaaaatgggttgttcggtaaccttatagcgctctcactaggcctgacaccaaattttaagtcgaacttcgacttagctgaagatgccaaattgcagcttagtaaggacacgtacgatgacgatctcgacaatctactggcacaaattggagatcagtatgcggacttatttttggctgccaaaaaccttagcgatgcaatcctcctatctgacatactgagagttaatactgagattaccaaggcgccgttatccgcttcaatgatcaaaaggtacgatgaacatcaccaagacttgacacttctcaaggccctagtccgtcagcaactgcctgagaaatataaggaaatattctttgatcagtcgaaaaacgggtacgcaggttatattgacggcggagcgagtcaagaggaattctacaagtttatcaaacccatattagagaagatggatgggacggaagagttgcttgtaaaactcaatcgcgaagatctactgcgaaagcagcggactttcgacaacggtagcattccacatcaaatccacttaggcgaattgcatgctatacttagaaggcaggaggatttttatccgttcctcaaagacaatcgtgaaaagattgagaaaatcctaacctttcgcataccttactatgtgggacccctggcccgagggaactctcggttcgcatggatgacaagaaagtccgaagaaacgattactccatggaattttgaggaagttgtcgataaaggtgcgtcagctcaatcgttcatcgagaggatgaccaactttgacaagaatttaccgaacgaaaaagtattgcctaagcacagtttactttacgagtatttcacagtgtacaatgaactcacgaaagttaagtatgtcactgagggcatgcgtaaacccgcctttctaagcggagaacagaagaaagcaatagtagatctgttattcaagaccaaccgcaaagtgacagttaagcaattgaaagaggactactttaagaaaattgaatgcttcgattctgtcgagatctccggggtagaagatcgatttaatgcgtcacttggtacgtatcatgacctcctaaagataattaaagataaggacttcctggataacgaagagaatgaagatatcttagaagatatagtgttgactcttaccctctttgaagatcgggaaatgattgaggaaagactaaaaacatacgctcacctgttcgacgataaggttatgaaacagttaaagaggcgtcgctatacgggctggggacgattgtcgcggaaacttatcaacgggataagagacaagcaaagtggtaaaactattctcgattttctaaagagcgacggcttcgccaataggaactttatgcagctgatccatgatgactctttaaccttcaaagaggatatacaaaaggcacaggtttccggacaaggggactcattgcacgaacatattgcgaatcttgctggttcgccagccatcaaaaagggcatactccagacagtcaaagtagtggatgagctagttaaggtcatgggacgtcacaaaccggaaaacattgtaatcgagatggcacgcgaaaatcaaacgactcagaaggggcaaaaaaacagtcgagagcggatgaagagaatagaagagggtattaaagaactgggcagccagatcttaaaggagcatcctgtggaaaatacccaattgcagaacgagaaactttacctctattacctacaaaatggaagggacatgtatgttgatcaggaactggacataaaccgtttatctgattacgacgtcgatgccattgtaccccaatcctttttgaaggacgattcaatcgacaataaagtgcttacacgctcggataagaaccgagggaaaagtgacaatgttccaagcgaggaagtcgtaaagaaaatgaagaactattggcggcagctcctaaatgcgaaactgataacgcaaagaaagttcgataacttaactaaagctgagaggggtggcttgtctgaacttgacaaggccggatttattaaacgtcagctcgtggaaacccgccaaatcacaaagcatgttgcacagatactagattcccgaatgaatacgaaatacgacgagaacgataagctgattcgggaagtcaaagtaatcactttaaagtcaaaattggtgtcggacttcagaaaggattttcaattctataaagttagggagataaataactaccaccatgcgcacgacgcttatcttaatgccgtcgtagggaccgcactcattaagaaatacccgaagctagaaagtgagtttgtgtatggtgattacaaagtttatgacgtccgtaagatgatcgcgaaaagcgaacaggagataggcaaggctacagccaaatacttcttttattctaacattatgaatttctttaagacggaaatcactctggcaaacggagagatacgcaaacgacctttaattgaaaccaatggggagacaggtgaaatcgtatgggataagggccgggacttcgcgacggtgagaaaagttttgtccatgccccaagtcaacatagtaaagaaaactgaggtgcagaccggagggttttcaaaggaatcgattcttccaaaaaggaatagtgataagctcatcgctcgtaaaaaggactgggacccgaaaaagtacggtggcttcgatagccctacagttgcctattctgtcctagtagtggcaaaagttgagaagggaaaatccaagaaactgaagtcagtcaaagaattattggggataacgattatggagcgctcgtcttttgaaaagaaccccatcgacttccttgaggcgaaaggttacaaggaagtaaaaaaggatctcataattaaactaccaaagtatagtctgtttgagttagaaaatggccgaaaacggatgttggctagcgccggagagcttcaaaaggggaacgaactcgcactaccgtctaaatacgtgaatttcctgtatttagcgtcccattacgagaagttgaaaggttcacctgaagataacgaacagaagcaactttttgttgagcagcacaaacattatctcgacgaaatcatagagcaaatttcggaattcagtaagagagtcatcctagctgatgccaatctggacaaagtattaagcgcatacaacaagcacagggataaacccatacgtgagcaggcggaaaatattatccatttgtttactcttaccaacctcggcgctccagccgcattcaagtattttgacacaacgatagatcgcaaacgatacacttctaccaaggaggtgctagacgcgacactgattcaccaatccatcacgggattatatgaaactcggatagatttgtcacagcttgggggtgacaactcaaagaaaaggtcactggaggacaacgaaacggaaatcaaagtctccagagacacctggaacactaagaacatgcggtccctggaaccgccacgaagcaagaaacggatacat

SEQ ID NO: 239 - DNA, 5226 bp, Artificial Sequence
  chemically synthesized
atgcccaaaaagaagaggaaagtcagctctgtcttgaaaaagggcgatgcgctggcgagcacggatcttgtaatggaatattctgaaactgacgaaaagtttacagcaggagctgaactgcacgatggagtgtttatgcggggcgatcttattgtccctccactcgaaatgctccacgccatactcttggcaatacacggggtgagtcatacacataagggtgggataatgtcatacttttctaagttttggacccaccctaaagctagtcagacgatcgatctcatcctcggtcactgccaaatctgccttaaacataacccaaagtataagtccaggctccaaggacaccgccctttgcccagtcgacccttcgcacacttgcaaattgattttgtccaaatgtgcgtaaaaaagcctatgtatgcacttgttatcattgatgtatttagtaaatggccagagataattccttgtaataaagaagacgcaaaaactgtatgcgatattctcatgaaggacataatccctagatggggcctgcctgatcaaattgacagcgatcaaggcacgcatttcacagcaaagataagccaagaactgacccactccattggagtggcatggaaactccactgtccaggtcacccccggagttcagggatcgttgagcgcacgaaccgaacattgaaatctaagattatcaaggcccaggagcagcttcaactgagtaaatggactgaggttttgccctacgtgctgctcgaaatgagagcaactcccaagaagcacggacttagccctcatgaaatcgtaatggggcgacccatgaaaacaacctacctttccgatatgtcccctctgtgggccactgacactttggtgacttacatgaacaagttgacacgacaactctctgcctaccaccagcaagttgtagaccagtggccctccactagcttggggggcgggggaagcggcggtggaggtagtggagggggaggatcagataaaaagtattctattggtttagccatcggcactaattccgttggatgggctgtcataaccgatgaatacaaagtaccttcaaagaaatttaaggtgttggggaacacagaccgtcattcgattaaaaagaatcttatcggtgccctcctattcgatagtggcgaaacggcagaggcgactcgcctgaaacgaaccgctcggagaaggtatacacgtcgcaagaaccgaatatgttacttacaagaaatttttagcaatgagatggccaaagttgacgattctttctttcaccgtttggaagagtccttccttgtcgaagaggacaagaaacatgaacggcaccccatctttggaaacatagtagatgaggtggcatatcatgaaaagtacccaacgatttatcacctcagaaaaaagctagttgactcaactgataaagcggacctgaggttaatctacttggctcttgcccatatgataaagttccgtgggcactttctcattgagggtgatctaaatccggacaactcggatgtcgacaaactgttcatccagttagtacaaacctataatcagttgtttgaagagaaccctataaatgcaagtggcgtggatgcgaaggctattcttagcgcccgcctctctaaatcccgacggctagaaaacctgatcgcacaattacccggagagaagaaaaatgggttgttcggtaaccttatagcgctctcactaggcctgacaccaaattttaagtcgaacttcgacttagctgaagatgccaaattgcagcttagtaaggacacgtacgatgacgatctcgacaatctactggcacaaattggagatcagtatgcggacttatttttggctgccaaaaaccttagcgatgcaatcctcctatctgacatactgagagttaatactgagattaccaaggcgccgttatccgcttcaatgatcaaaaggtacgatgaacatcaccaagacttgacacttctcaaggccctagtccgtcagcaactgcctgagaaatataaggaaatattctttgatcagtcgaaaaacgggtacgcaggttatattgacggcggagcgagtcaagaggaattctacaagtttatcaaacccatattagagaagatggatgggacggaagagttgcttgtaaaactcaatcgcgaagatctactgcgaaagcagcggactttcgacaacggtagcattccacatcaaatccacttaggcgaattgcatgctatacttagaaggcaggaggatttttatccgttcctcaaagacaatcgtgaaaagattgagaaaatcctaacctttcgcataccttactatgtgggacccctggcccgagggaactctcggttcgcatggatgacaagaaagtccgaagaaacgattactccatggaattttgaggaagttgtcgataaaggtgcgtcagctcaatcgttcatcgagaggatgaccaactttgacaagaatttaccgaacgaaaaagtattgcctaagcacagtttactttacgagtatttcacagtgtacaatgaactcacgaaagttaagtatgtcactgagggcatgcgtaaacccgcctttctaagcggagaacagaagaaagcaatagtagatctgttattcaagaccaaccgcaaagtgacagttaagcaattgaaagaggactactttaagaaaattgaatgcttcgattctgtcgagatctccggggtagaagatcgatttaatgcgtcacttggtacgtatcatgacctcctaaagataattaaagataaggacttcctggataacgaagagaatgaagatatcttagaagatatagtgttgactcttaccctctttgaagatcgggaaatgattgaggaaagactaaaaacatacgctcacctgttcgacgataaggttatgaaacagttaaagaggcgtcgctatacgggctggggacgattgtcgcggaaacttatcaacgggataagagacaagcaaagtggtaaaactattctcgattttctaaagagcgacggcttcgccaataggaactttatgcagctgatccatgatgactctttaaccttcaaagaggatatacaaaaggcacaggtttccggacaaggggactcattgcacgaacatattgcgaatcttgctggttcgccagccatcaaaaagggcatactccagacagtcaaagtagtggatgagctagttaaggtcatgggacgtcacaaaccggaaaacattgtaatcgagatggcacgcgaaaatcaaacgactcagaaggggcaaaaaaacagtcgagagcggatgaagagaatagaagagggtattaaagaactgggcagccagatcttaaaggagcatcctgtggaaaatacccaattgcagaacgagaaactttacctctattacctacaaaatggaagggacatgtatgttgatcaggaactggacataaaccgtttatctgattacgacgtcgatgccattgtaccccaatcctttttgaaggacgattcaatcgacaataaagtgcttacacgctcggataagaaccgagggaaaagtgacaatgttccaagcgaggaagtcgtaaagaaaatgaagaactattggcggcagctcctaaatgcgaaactgataacgcaaagaaagttcgataacttaactaaagctgagaggggtggcttgtctgaacttgacaaggccggatttattaaacgtcagctcgtggaaacccgccaaatcacaaagcatgttgcacagatactagattcccgaatgaatacgaaatacgacgagaacgataagctgattcgggaagtcaaagtaatcactttaaagtcaaaattggtgtcggacttcagaaaggattttcaattctataaagttagggagataaataactaccaccatgcgcacgacgcttatcttaatgccgtcgtagggaccgcactcattaagaaatacccgaagctagaaagtgagtttgtgtatggtgattacaaagtttatgacgtccgtaagatgatcgcgaaaagcgaacaggagataggcaaggctacagccaaatacttcttttattctaacattatgaatttctttaagacggaaatcactctggcaaacggagagatacgcaaacgacctttaattgaaaccaatggggagacaggtgaaatcgtatgggataagggccgggacttcgcgacggtgagaaaagttttgtccatgccccaagtcaacatagtaaagaaaactgaggtgcagaccggagggttttcaaaggaatcgattcttccaaaaaggaatagtgataagctcatcgctcgtaaaaaggactgggacccgaaaaagtacggtggcttcgatagccctacagttgcctattctgtcctagtagtggcaaaagttgagaagggaaaatccaagaaactgaagtcagtcaaagaattattggggataacgattatggagcgctcgtcttttgaaaagaaccccatcgacttccttgaggcgaaaggttacaaggaagtaaaaaaggatctcataattaaactaccaaagtatagtctgtttgagttagaaaatggccgaaaacggatgttggctagcgccggagagcttcaaaaggggaacgaactcgcactaccgtctaaatacgtgaatttcctgtatttagcgtcccattacgagaagttgaaaggttcacctgaagataacgaacagaagcaactttttgttgagcagcacaaacattatctcgacgaaatcatagagcaaatttcggaattcagtaagagagtcatcctagctgatgccaatctggacaaagtattaagcgcatacaacaagcacagggataaacccatacgtgagcaggcggaaaatattatccatttgtttactcttaccaacctcggcgctccagccgcattcaagtattttgacacaacgatagatcgcaaacgatacacttctaccaaggaggtgctagacgcgacactgattcaccaatccatcacgggattatatgaaactcggatagatttgtcacagcttgggggtgacaactcaaagaaaaggtcactggaggacaacgaaacggaaatcaaagtctccagagacacctggaacactaagaacatgcggtccctggaaccgccacgaagcaagaaacggatacat

SEQ ID NO: 240 - DNA, 5181 bp, Artificial Sequence
  chemically synthesized
atgcccaaaaagaagaggaaagtcagctctttgccactggaaacacctgagcaatggcacaagctgacccattgtaacagccgagcacttagtcgatggccgaatccgaggatttccgcttgggacccacgatctccggccaccctgtgcgaaacgtgtcagaaactcaatccaacagggggcgggaaaatgagaacgatccagcgagggtgggctcctaaccacatctggcaggctgacatcacgcattacaagtataaacagtttacatacgcactgcatgtgttcgtcgatacgtattcaggtgctacacacgcttctgctaagcgcggtctcacaacacagatgacgattgaaggccttcttgaggctattgtccacttgggaaggccgaaaaagttgaacaccgatcaaggtgcaaactatacgagcaagactttcgttcggttttgccaacagtttggggtatctcttagtcatcacgtaccctataatcccaccagttccggcttggtggaacgaacgaacggtctgctgaaactgttgctgtccaaatatcacttggatgagccacatttgccgatgactcaggccctctcccgcgctctctggacacacaaccagataaaccttctcccgatacttaagactcgctgggaacttcaccattcacctccattggcagttattagtgaaggtggtgagactcctaaaggtagtgacaaacttttcttgtacaagttgcccggccaaaataaccggaggtggctcgggccgttgccagcgcttgtcgaagcgtctggcggggccctgcttgcgaccgacccccctgtctgggtgccatggcggctcttgaaggcgttcaagtgcctgaaaaatgacggaccagaagacgcgcataatagaagctcagatggtgggggcgggggaagcggcggtggaggtagtggagggggaggatcagataaaaagtattctattggtttagccatcggcactaattccgttggatgggctgtcataaccgatgaatacaaagtaccttcaaagaaatttaaggtgttggggaacacagaccgtcattcgattaaaaagaatcttatcggtgccctcctattcgatagtggcgaaacggcagaggcgactcgcctgaaacgaaccgctcggagaaggtatacacgtcgcaagaaccgaatatgttacttacaagaaatttttagcaatgagatggccaaagttgacgattctttctttcaccgtttggaagagtccttccttgtcgaagaggacaagaaacatgaacggcaccccatctttggaaacatagtagatgaggtggcatatcatgaaaagtacccaacgatttatcacctcagaaaaaagctagttgactcaactgataaagcggacctgaggttaatctacttggctcttgcccatatgataaagttccgtgggcactttctcattgagggtgatctaaatccggacaactcggatgtcgacaaactgttcatccagttagtacaaacctataatcagttgtttgaagagaaccctataaatgcaagtggcgtggatgcgaaggctattcttagcgcccgcctctctaaatcccgacggctagaaaacctgatcgcacaattacccggagagaagaaaaatgggttgttcggtaaccttatagcgctctcactaggcctgacaccaaattttaagtcgaacttcgacttagctgaagatgccaaattgcagcttagtaaggacacgtacgatgacgatctcgacaatctactggcacaaattggagatcagtatgcggacttatttttggctgccaaaaaccttagcgatgcaatcctcctatctgacatactgagagttaatactgagattaccaaggcgccgttatccgcttcaatgatcaaaaggtacgatgaacatcaccaagacttgacacttctcaaggccctagtccgtcagcaactgcctgagaaatataaggaaatattctttgatcagtcgaaaaacgggtacgcaggttatattgacggcggagcgagtcaagaggaattctacaagtttatcaaacccatattagagaagatggatgggacggaagagttgcttgtaaaactcaatcgcgaagatctactgcgaaagcagcggactttcgacaacggtagcattccacatcaaatccacttaggcgaattgcatgctatacttagaaggcaggaggatttttatccgttcctcaaagacaatcgtgaaaagattgagaaaatcctaacctttcgcataccttactatgtgggacccctggcccgagggaactctcggttcgcatggatgacaagaaagtccgaagaaacgattactccatggaattttgaggaagttgtcgataaaggtgcgtcagctcaatcgttcatcgagaggatgaccaactttgacaagaatttaccgaacgaaaaagtattgcctaagcacagtttactttacgagtatttcacagtgtacaatgaactcacgaaagttaagtatgtcactgagggcatgcgtaaacccgcctttctaagcggagaacagaagaaagcaatagtagatctgttattcaagaccaaccgcaaagtgacagttaagcaattgaaagaggactactttaagaaaattgaatgcttcgattctgtcgagatctccggggtagaagatcgatttaatgcgtcacttggtacgtatcatgacctcctaaagataattaaagataaggacttcctggataacgaagagaatgaagatatcttagaagatatagtgttgactcttaccctctttgaagatcgggaaatgattgaggaaagactaaaaacatacgctcacctgttcgacgataaggttatgaaacagttaaagaggcgtcgctatacgggctggggacgattgtcgcggaaacttatcaacgggataagagacaagcaaagtggtaaaactattctcgattttctaaagagcgacggcttcgccaataggaactttatgcagctgatccatgatgactctttaaccttcaaagaggatatacaaaaggcacaggtttccggacaaggggactcattgcacgaacatattgcgaatcttgctggttcgccagccatcaaaaagggcatactccagacagtcaaagtagtggatgagctagttaaggtcatgggacgtcacaaaccggaaaacattgtaatcgagatggcacgcgaaaatcaaacgactcagaaggggcaaaaaaacagtcgagagcggatgaagagaatagaagagggtattaaagaactgggcagccagatcttaaaggagcatcctgtggaaaatacccaattgcagaacgagaaactttacctctattacctacaaaatggaagggacatgtatgttgatcaggaactggacataaaccgtttatctgattacgacgtcgatgccattgtaccccaatcctttttgaaggacgattcaatcgacaataaagtgcttacacgctcggataagaaccgagggaaaagtgacaatgttccaagcgaggaagtcgtaaagaaaatgaagaactattggcggcagctcctaaatgcgaaactgataacgcaaagaaagttcgataacttaactaaagctgagaggggtggcttgtctgaacttgacaaggccggatttattaaacgtcagctcgtggaaacccgccaaatcacaaagcatgttgcacagatactagattcccgaatgaatacgaaatacgacgagaacgataagctgattcgggaagtcaaagtaatcactttaaagtcaaaattggtgtcggacttcagaaaggattttcaattctataaagttagggagataaataactaccaccatgcgcacgacgcttatcttaatgccgtcgtagggaccgcactcattaagaaatacccgaagctagaaagtgagtttgtgtatggtgattacaaagtttatgacgtccgtaagatgatcgcgaaaagcgaacaggagataggcaaggctacagccaaatacttcttttattctaacattatgaatttctttaagacggaaatcactctggcaaacggagagatacgcaaacgacctttaattgaaaccaatggggagacaggtgaaatcgtatgggataagggccgggacttcgcgacggtgagaaaagttttgtccatgccccaagtcaacatagtaaagaaaactgaggtgcagaccggagggttttcaaaggaatcgattcttccaaaaaggaatagtgataagctcatcgctcgtaaaaaggactgggacccgaaaaagtacggtggcttcgatagccctacagttgcctattctgtcctagtagtggcaaaagttgagaagggaaaatccaagaaactgaagtcagtcaaagaattattggggataacgattatggagcgctcgtcttttgaaaagaaccccatcgacttccttgaggcgaaaggttacaaggaagtaaaaaaggatctcataattaaactaccaaagtatagtctgtttgagttagaaaatggccgaaaacggatgttggctagcgccggagagcttcaaaaggggaacgaactcgcactaccgtctaaatacgtgaatttcctgtatttagcgtcccattacgagaagttgaaaggttcacctgaagataacgaacagaagcaactttttgttgagcagcacaaacattatctcgacgaaatcatagagcaaatttcggaattcagtaagagagtcatcctagctgatgccaatctggacaaagtattaagcgcatacaacaagcacagggataaacccatacgtgagcaggcggaaaatattatccatttgtttactcttaccaacctcggcgctccagccgcattcaagtattttgacacaacgatagatcgcaaacgatacacttctaccaaggaggtgctagacgcgacactgattcaccaatccatcacgggattatatgaaactcggatagatttgtcacagcttgggggtgacaactcaaagaaaaggtcactggaggacaacgaaacggaaatcaaagtctccagagacacctggaacactaagaacatgcggtccctggaaccgccacgaagcaagaaacggatacat

SEQ ID NO: 241 - DNA, 4974 bp, Artificial Sequence
  chemically synthesized
atgcccaaaaagaagaggaaagtcagctctttgccactggaaacacctgagcaatggcacaagctgacccattgtaacagccgagcacttagtcgatggccgaatccgaggatttccgcttgggacccacgatctccggccaccctgtgcgaaacgtgtcagaaactcaatccaacagggggcgggaaaatgagaacgatccagcgagggtgggctcctaaccacatctggcaggctgacatcacgcattacaagtataaacagtttacatacgcactgcatgtgttcgtcgatacgtattcaggtgctacacacgcttctgctaagcgcggtctcacaacacagatgacgattgaaggccttcttgaggctattgtccacttgggaaggccgaaaaagttgaacaccgatcaaggtgcaaactatacgagcaagactttcgttcggttttgccaacagtttggggtatctcttagtcatcacgtaccctataatcccaccagttccggcttggtggaacgaacgaacggtctgctgaaactgttgctgtccaaatatcacttggatgagccacatttgccgatgactcaggccctctcccgcgctctctggacacacaaccagataaaccttctcccgatacttaagactcgctgggaacttcaccattcacctccattggcagttattagtgaaggtggtgagactcctgggggcgggggaagcggcggtggaggtagtggagggggaggatcagataaaaagtattctattggtttagccatcggcactaattccgttggatgggctgtcataaccgatgaatacaaagtaccttcaaagaaatttaaggtgttggggaacacagaccgtcattcgattaaaaagaatcttatcggtgccctcctattcgatagtggcgaaacggcagaggcgactcgcctgaaacgaaccgctcggagaaggtatacacgtcgcaagaaccgaatatgttacttacaagaaatttttagcaatgagatggccaaagttgacgattctttctttcaccgtttggaagagtccttccttgtcgaagaggacaagaaacatgaacggcaccccatctttggaaacatagtagatgaggtggcatatcatgaaaagtacccaacgatttatcacctcagaaaaaagctagttgactcaactgataaagcggacctgaggttaatctacttggctcttgcccatatgataaagttccgtgggcactttctcattgagggtgatctaaatccggacaactcggatgtcgacaaactgttcatccagttagtacaaacctataatcagttgtttgaagagaaccctataaatgcaagtggcgtggatgcgaaggctattcttagcgcccgcctctctaaatcccgacggctagaaaacctgatcgcacaattacccggagagaagaaaaatgggttgttcggtaaccttatagcgctctcactaggcctgacaccaaattttaagtcgaacttcgacttagctgaagatgccaaattgcagcttagtaaggacacgtacgatgacgatctcgacaatctactggcacaaattggagatcagtatgcggacttatttttggctgccaaaaaccttagcgatgcaatcctcctatctgacatactgagagttaatactgagattaccaaggcgccgttatccgcttcaatgatcaaaaggtacgatgaacatcaccaagacttgacacttctcaaggccctagtccgtcagcaactgcctgagaaatataaggaaatattctttgatcagtcgaaaaacgggtacgcaggttatattgacggcggagcgagtcaagaggaattctacaagtttatcaaacccatattagagaagatggatgggacggaagagttgcttgtaaaactcaatcgcgaagatctactgcgaaagcagcggactttcgacaacggtagcattccacatcaaatccacttaggcgaattgcatgctatacttagaaggcaggaggatttttatccgttcctcaaagacaatcgtgaaaagattgagaaaatcctaacctttcgcataccttactatgtgggacccctggcccgagggaactctcggttcgcatggatgacaagaaagtccgaagaaacgattactccatggaattttgaggaagttgtcgataaaggtgcgtcagctcaatcgttcatcgagaggatgaccaactttgacaagaatttaccgaacgaaaaagtattgcctaagcacagtttactttacgagtatttcacagtgtacaatgaactcacgaaagttaagtatgtcactgagggcatgcgtaaacccgcctttctaagcggagaacagaagaaagcaatagtagatctgttattcaagaccaaccgcaaagtgacagttaagcaattgaaagaggactactttaagaaaattgaatgcttcgattctgtcgagatctccggggtagaagatcgatttaatgcgtcacttggtacgtatcatgacctcctaaagataattaaagataaggacttcctggataacgaagagaatgaagatatcttagaagatatagtgttgactcttaccctctttgaagatcgggaaatgattgaggaaagactaaaaacatacgctcacctgttcgacgataaggttatgaaacagttaaagaggcgtcgctatacgggctggggacgattgtcgcggaaacttatcaacgggataagagacaagcaaagtggtaaaactattctcgattttctaaagagcgacggcttcgccaataggaactttatgcagctgatccatgatgactctttaaccttcaaagaggatatacaaaaggcacaggtttccggacaaggggactcattgcacgaacatattgcgaatcttgctggttcgccagccatcaaaaagggcatactccagacagtcaaagtagtggatgagctagttaaggtcatgggacgtcacaaaccggaaaacattgtaatcgagatggcacgcgaaaatcaaacgactcagaaggggcaaaaaaacagtcgagagcggatgaagagaatagaagagggtattaaagaactgggcagccagatcttaaaggagcatcctgtggaaaatacccaattgcagaacgagaaactttacctctattacctacaaaatggaagggacatgtatgttgatcaggaactggacataaaccgtttatctgattacgacgtcgatgccattgtaccccaatcctttttgaaggacgattcaatcgacaataaagtgcttacacgctcggataagaaccgagggaaaagtgacaatgttccaagcgaggaagtcgtaaagaaaatgaagaactattggcggcagctcctaaatgcgaaactgataacgcaaagaaagttcgataacttaactaaagctgagaggggtggcttgtctgaacttgacaaggccggatttattaaacgtcagctcgtggaaacccgccaaatcacaaagcatgttgcacagatactagattcccgaatgaatacgaaatacgacgagaacgataagctgattcgggaagtcaaagtaatcactttaaagtcaaaattggtgtcggacttcagaaaggattttcaattctataaagttagggagataaataactaccaccatgcgcacgacgcttatcttaatgccgtcgtagggaccgcactcattaagaaatacccgaagctagaaagtgagtttgtgtatggtgattacaaagtttatgacgtccgtaagatgatcgcgaaaagcgaacaggagataggcaaggctacagccaaatacttcttttattctaacattatgaatttctttaagacggaaatcactctggcaaacggagagatacgcaaacgacctttaattgaaaccaatggggagacaggtgaaatcgtatgggataagggccgggacttcgcgacggtgagaaaagttttgtccatgccccaagtcaacatagtaaagaaaactgaggtgcagaccggagggttttcaaaggaatcgattcttccaaaaaggaatagtgataagctcatcgctcgtaaaaaggactgggacccgaaaaagtacggtggcttcgatagccctacagttgcctattctgtcctagtagtggcaaaagttgagaagggaaaatccaagaaactgaagtcagtcaaagaattattggggataacgattatggagcgctcgtcttttgaaaagaaccccatcgacttccttgaggcgaaaggttacaaggaagtaaaaaaggatctcataattaaactaccaaagtatagtctgtttgagttagaaaatggccgaaaacggatgttggctagcgccggagagcttcaaaaggggaacgaactcgcactaccgtctaaatacgtgaatttcctgtatttagcgtcccattacgagaagttgaaaggttcacctgaagataacgaacagaagcaactttttgttgagcagcacaaacattatctcgacgaaatcatagagcaaatttcggaattcagtaagagagtcatcctagctgatgccaatctggacaaagtattaagcgcatacaacaagcacagggataaacccatacgtgagcaggcggaaaatattatccatttgtttactcttaccaacctcggcgctccagccgcattcaagtattttgacacaacgatagatcgcaaacgatacacttctaccaaggaggtgctagacgcgacactgattcaccaatccatcacgggattatatgaaactcggatagatttgtcacagcttgggggtgacaactcaaagaaaaggtcactggaggacaacgaaacggaaatcaaagtctccagagacacctggaacactaagaacatgcggtccctggaaccgccacgaagcaagaaacggatacat

SEQ ID NO: 242 - DNA, 5172 bp, Artificial Sequence
  chemically synthesized
atgcccaaaaagaagaggaaagtcagctctttcctggagaaaattgagcctgcgcaagaagagcacgacaaatatcacagtaatgtaaaggagttggttttcaaatttggacttccacggattgtagctcgccagatagttgatacctgtgataaatgtcaccaaaagggtgaagctattcacggtcaggcgaactctgacttgggcacgtggcagatggactgcactcacttggaaggtaaaatcattatcgttgcggttcatgtagccagtggattcatcgaagcagaagtcattcctcaggaaacaggaagacagacagcactgttcctcctcaagctcgcaggtaggtggcccatcacgcatcttcataccgataatggcgcaaactttgcaagccaggaggtgaaaatggtagcttggtgggctggtatagaacacacgtttggtgtcccgtacaaccctcaaagtcaaggcgttgtggaggccatgaaccatcacttgaagaaccaaatcgaccgcataagagagcaggccaactccgtagaaacgatcgtactcatggcggtacactgcatgaacttcaagcgacgaggaggcatcggggatatgacgcccgcggagcggctcatcaatatgataacaaccgaacaggagattcagttccaacagtccaaaaactcaaaatttaagaattttagagtgtattaccgggaaggtagagaccagttgtggaagggtcctggtgaattgttgtggaagggtgaaggtgcggtaatcctgaaggtaggtaccgacatcaaggtcgttcccagaaggaaggctaagatcatcaaggattatgggggtgggaaagaagtggattcctctagtcacatggaagataccggcgaggctagggaggttgcggggggcgggggaagcggcggtggaggtagtggagggggaggatcagataaaaagtattctattggtttagccatcggcactaattccgttggatgggctgtcataaccgatgaatacaaagtaccttcaaagaaatttaaggtgttggggaacacagaccgtcattcgattaaaaagaatcttatcggtgccctcctattcgatagtggcgaaacggcagaggcgactcgcctgaaacgaaccgctcggagaaggtatacacgtcgcaagaaccgaatatgttacttacaagaaatttttagcaatgagatggccaaagttgacgattctttctttcaccgtttggaagagtccttccttgtcgaagaggacaagaaacatgaacggcaccccatctttggaaacatagtagatgaggtggcatatcatgaaaagtacccaacgatttatcacctcagaaaaaagctagttgactcaactgataaagcggacctgaggttaatctacttggctcttgcccatatgataaagttccgtgggcactttctcattgagggtgatctaaatccggacaactcggatgtcgacaaactgttcatccagttagtacaaacctataatcagttgtttgaagagaaccctataaatgcaagtggcgtggatgcgaaggctattcttagcgcccgcctctctaaatcccgacggctagaaaacctgatcgcacaattacccggagagaagaaaaatgggttgttcggtaaccttatagcgctctcactaggcctgacaccaaattttaagtcgaacttcgacttagctgaagatgccaaattgcagcttagtaaggacacgtacgatgacgatctcgacaatctactggcacaaattggagatcagtatgcggacttatttttggctgccaaaaaccttagcgatgcaatcctcctatctgacatactgagagttaatactgagattaccaaggcgccgttatccgcttcaatgatcaaaaggtacgatgaacatcaccaagacttgacacttctcaaggccctagtccgtcagcaactgcctgagaaatataaggaaatattctttgatcagtcgaaaaacgggtacgcaggttatattgacggcggagcgagtcaagaggaattctacaagtttatcaaacccatattagagaagatggatgggacggaagagttgcttgtaaaactcaatcgcgaagatctactgcgaaagcagcggactttcgacaacggtagcattccacatcaaatccacttaggcgaattgcatgctatacttagaaggcaggaggatttttatccgttcctcaaagacaatcgtgaaaagattgagaaaatcctaacctttcgcataccttactatgtgggacccctggcccgagggaactctcggttcgcatggatgacaagaaagtccgaagaaacgattactccatggaattttgaggaagttgtcgataaaggtgcgtcagctcaatcgttcatcgagaggatgaccaactttgacaagaatttaccgaacgaaaaagtattgcctaagcacagtttactttacgagtatttcacagtgtacaatgaactcacgaaagttaagtatgtcactgagggcatgcgtaaacccgcctttctaagcggagaacagaagaaagcaatagtagatctgttattcaagaccaaccgcaaagtgacagttaagcaattgaaagaggactactttaagaaaattgaatgcttcgattctgtcgagatctccggggtagaagatcgatttaatgcgtcacttggtacgtatcatgacctcctaaagataattaaagataaggacttcctggataacgaagagaatgaagatatcttagaagatatagtgttgactcttaccctctttgaagatcgggaaatgattgaggaaagactaaaaacatacgctcacctgttcgacgataaggttatgaaacagttaaagaggcgtcgctatacgggctggggacgattgtcgcggaaacttatcaacgggataagagacaagcaaagtggtaaaactattctcgattttctaaagagcgacggcttcgccaataggaactttatgcagctgatccatgatgactctttaaccttcaaagaggatatacaaaaggcacaggtttccggacaaggggactcattgcacgaacatattgcgaatcttgctggttcgccagccatcaaaaagggcatactccagacagtcaaagtagtggatgagctagttaaggtcatgggacgtcacaaaccggaaaacattgtaatcgagatggcacgcgaaaatcaaacgactcagaaggggcaaaaaaacagtcgagagcggatgaagagaatagaagagggtattaaagaactgggcagccagatcttaaaggagcatcctgtggaaaatacccaattgcagaacgagaaactttacctctattacctacaaaatggaagggacatgtatgttgatcaggaactggacataaaccgtttatctgattacgacgtcgatgccattgtaccccaatcctttttgaaggacgattcaatcgacaataaagtgcttacacgctcggataagaaccgagggaaaagtgacaatgttccaagcgaggaagtcgtaaagaaaatgaagaactattggcggcagctcctaaatgcgaaactgataacgcaaagaaagttcgataacttaactaaagctgagaggggtggcttgtctgaacttgacaaggccggatttattaaacgtcagctcgtggaaacccgccaaatcacaaagcatgttgcacagatactagattcccgaatgaatacgaaatacgacgagaacgataagctgattcgggaagtcaaagtaatcactttaaagtcaaaattggtgtcggacttcagaaaggattttcaattctataaagttagggagataaataactaccaccatgcgcacgacgcttatcttaatgccgtcgtagggaccgcactcattaagaaatacccgaagctagaaagtgagtttgtgtatggtgattacaaagtttatgacgtccgtaagatgatcgcgaaaagcgaacaggagataggcaaggctacagccaaatacttcttttattctaacattatgaatttctttaagacggaaatcactctggcaaacggagagatacgcaaacgacctttaattgaaaccaatggggagacaggtgaaatcgtatgggataagggccgggacttcgcgacggtgagaaaagttttgtccatgccccaagtcaacatagtaaagaaaactgaggtgcagaccggagggttttcaaaggaatcgattcttccaaaaaggaatagtgataagctcatcgctcgtaaaaaggactgggacccgaaaaagtacggtggcttcgatagccctacagttgcctattctgtcctagtagtggcaaaagttgagaagggaaaatccaagaaactgaagtcagtcaaagaattattggggataacgattatggagcgctcgtcttttgaaaagaaccccatcgacttccttgaggcgaaaggttacaaggaagtaaaaaaggatctcataattaaactaccaaagtatagtctgtttgagttagaaaatggccgaaaacggatgttggctagcgccggagagcttcaaaaggggaacgaactcgcactaccgtctaaatacgtgaatttcctgtatttagcgtcccattacgagaagttgaaaggttcacctgaagataacgaacagaagcaactttttgttgagcagcacaaacattatctcgacgaaatcatagagcaaatttcggaattcagtaagagagtcatcctagctgatgccaatctggacaaagtattaagcgcatacaacaagcacagggataaacccatacgtgagcaggcggaaaatattatccatttgtttactcttaccaacctcggcgctccagccgcattcaagtattttgacacaacgatagatcgcaaacgatacacttctaccaaggaggtgctagacgcgacactgattcaccaatccatcacgggattatatgaaactcggatagatttgtcacagcttgggggtgacaactcaaagaaaaggtcactggaggacaacgaaacggaaatcaaagtctccagagacacctggaacactaagaacatgcggtccctggaaccgccacgaagcaagaaacggatacat

SEQ ID NO: 243 - DNA, 4959 bp, Artificial Sequence
  chemically synthesized
atgcccaaaaagaagaggaaagtcagctctttcctggagaaaattgagcctgcgcaagaagagcacgacaaatatcacagtaatgtaaaggagttggttttcaaatttggacttccacggattgtagctcgccagatagttgatacctgtgataaatgtcaccaaaagggtgaagctattcacggtcaggcgaactctgacttgggcacgtggcagatggactgcactcacttggaaggtaaaatcattatcgttgcggttcatgtagccagtggattcatcgaagcagaagtcattcctcaggaaacaggaagacagacagcactgttcctcctcaagctcgcaggtaggtggcccatcacgcatcttcataccgataatggcgcaaactttgcaagccaggaggtgaaaatggtagcttggtgggctggtatagaacacacgtttggtgtcccgtacaaccctcaaagtcaaggcgttgtggaggccatgaaccatcacttgaagaaccaaatcgaccgcataagagagcaggccaactccgtagaaacgatcgtactcatggcggtacactgcatgaacttcaagcgacgaggaggcatcggggatatgacgcccgcggagcggctcatcaatatgataacaaccgaacaggagattcagttccaacagtccaaaaactcaaaatttaagaatgggggcgggggaagcggcggtggaggtagtggagggggaggatcagataaaaagtattctattggtttagccatcggcactaattccgttggatgggctgtcataaccgatgaatacaaagtaccttcaaagaaatttaaggtgttggggaacacagaccgtcattcgattaaaaagaatcttatcggtgccctcctattcgatagtggcgaaacggcagaggcgactcgcctgaaacgaaccgctcggagaaggtatacacgtcgcaagaaccgaatatgttacttacaagaaatttttagcaatgagatggccaaagttgacgattctttctttcaccgtttggaagagtccttccttgtcgaagaggacaagaaacatgaacggcaccccatctttggaaacatagtagatgaggtggcatatcatgaaaagtacccaacgatttatcacctcagaaaaaagctagttgactcaactgataaagcggacctgaggttaatctacttggctcttgcccatatgataaagttccgtgggcactttctcattgagggtgatctaaatccggacaactcggatgtcgacaaactgttcatccagttagtacaaacctataatcagttgtttgaagagaaccctataaatgcaagtggcgtggatgcgaaggctattcttagcgcccgcctctctaaatcccgacggctagaaaacctgatcgcacaattacccggagagaagaaaaatgggttgttcggtaaccttatagcgctctcactaggcctgacaccaaattttaagtcgaacttcgacttagctgaagatgccaaattgcagcttagtaaggacacgtacgatgacgatctcgacaatctactggcacaaattggagatcagtatgcggacttatttttggctgccaaaaaccttagcgatgcaatcctcctatctgacatactgagagttaatactgagattaccaaggcgccgttatccgcttcaatgatcaaaaggtacgatgaacatcaccaagacttgacacttctcaaggccctagtccgtcagcaactgcctgagaaatataaggaaatattctttgatcagtcgaaaaacgggtacgcaggttatattgacggcggagcgagtcaagaggaattctacaagtttatcaaacccatattagagaagatggatgggacggaagagttgcttgtaaaactcaatcgcgaagatctactgcgaaagcagcggactttcgacaacggtagcattccacatcaaatccacttaggcgaattgcatgctatacttagaaggcaggaggatttttatccgttcctcaaagacaatcgtgaaaagattgagaaaatcctaacctttcgcataccttactatgtgggacccctggcccgagggaactctcggttcgcatggatgacaagaaagtccgaagaaacgattactccatggaattttgaggaagttgtcgataaaggtgcgtcagctcaatcgttcatcgagaggatgaccaactttgacaagaatttaccgaacgaaaaagtattgcctaagcacagtttactttacgagtatttcacagtgtacaatgaactcacgaaagttaagtatgtcactgagggcatgcgtaaacccgcctttctaagcggagaacagaagaaagcaatagtagatctgttattcaagaccaaccgcaaagtgacagttaagcaattgaaagaggactactttaagaaaattgaatgcttcgattctgtcgagatctccggggtagaagatcgatttaatgcgtcacttggtacgtatcatgacctcctaaagataattaaagataaggacttcctggataacgaagagaatgaagatatcttagaagatatagtgttgactcttaccctctttgaagatcgggaaatgattgaggaaagactaaaaacatacgctcacctgttcgacgataaggttatgaaacagttaaagaggcgtcgctatacgggctggggacgattgtcgcggaaacttatcaacgggataagagacaagcaaagtggtaaaactattctcgattttctaaagagcgacggcttcgccaataggaactttatgcagctgatccatgatgactctttaaccttcaaagaggatatacaaaaggcacaggtttccggacaaggggactcattgcacgaacatattgcgaatcttgctggttcgccagccatcaaaaagggcatactccagacagtcaaagtagtggatgagctagttaaggtcatgggacgtcacaaaccggaaaacattgtaatcgagatggcacgcgaaaatcaaacgactcagaaggggcaaaaaaacagtcgagagcggatgaagagaatagaagagggtattaaagaactgggcagccagatcttaaaggagcatcctgtggaaaatacccaattgcagaacgagaaactttacctctattacctacaaaatggaagggacatgtatgttgatcaggaactggacataaaccgtttatctgattacgacgtcgatgccattgtaccccaatcctttttgaaggacgattcaatcgacaataaagtgcttacacgctcggataagaaccgagggaaaagtgacaatgttccaagcgaggaagtcgtaaagaaaatgaagaactattggcggcagctcctaaatgcgaaactgataacgcaaagaaagttcgataacttaactaaagctgagaggggtggcttgtctgaacttgacaaggccggatttattaaacgtcagctcgtggaaacccgccaaatcacaaagcatgttgcacagatactagattcccgaatgaatacgaaatacgacgagaacgataagctgattcgggaagtcaaagtaatcactttaaagtcaaaattggtgtcggacttcagaaaggattttcaattctataaagttagggagataaataactaccaccatgcgcacgacgcttatcttaatgccgtcgtagggaccgcactcattaagaaatacccgaagctagaaagtgagtttgtgtatggtgattacaaagtttatgacgtccgtaagatgatcgcgaaaagcgaacaggagataggcaaggctacagccaaatacttcttttattctaacattatgaatttctttaagacggaaatcactctggcaaacggagagatacgcaaacgacctttaattgaaaccaatggggagacaggtgaaatcgtatgggataagggccgggacttcgcgacggtgagaaaagttttgtccatgccccaagtcaacatagtaaagaaaactgaggtgcagaccggagggttttcaaaggaatcgattcttccaaaaaggaatagtgataagctcatcgctcgtaaaaaggactgggacccgaaaaagtacggtggcttcgatagccctacagttgcctattctgtcctagtagtggcaaaagttgagaagggaaaatccaagaaactgaagtcagtcaaagaattattggggataacgattatggagcgctcgtcttttgaaaagaaccccatcgacttccttgaggcgaaaggttacaaggaagtaaaaaaggatctcataattaaactaccaaagtatagtctgtttgagttagaaaatggccgaaaacggatgttggctagcgccggagagcttcaaaaggggaacgaactcgcactaccgtctaaatacgtgaatttcctgtatttagcgtcccattacgagaagttgaaaggttcacctgaagataacgaacagaagcaactttttgttgagcagcacaaacattatctcgacgaaatcatagagcaaatttcggaattcagtaagagagtcatcctagctgatgccaatctggacaaagtattaagcgcatacaacaagcacagggataaacccatacgtgagcaggcggaaaatattatccatttgtttactcttaccaacctcggcgctccagccgcattcaagtattttgacacaacgatagatcgcaaacgatacacttctaccaaggaggtgctagacgcgacactgattcaccaatccatcacgggattatatgaaactcggatagatttgtcacagcttgggggtgacaactcaaagaaaaggtcactggaggacaacgaaacggaaatcaaagtctccagagacacctggaacactaagaacatgcggtccctggaaccgccacgaagcaagaaacggatacat

SEQ ID NO: 244 - DNA, 5136 bp, Artificial Sequence
  chemically synthesized
atgcccaaaaagaagaggaaagtcagctctagttcttgggtagaccgaatagaggaggctgagattaaccacgaaaaattccacagcgaccctcagtatcttcgaaccgaatttaatttgcccaagatggtcgctgaagaaatccgacgaaagtgccctgtatgccgcatccggggcgaacaggtgggcggccagttgaagataggtcctggtatctggcagatggactgcacgcacttcgatggcaagatcatcctggtagggatacacgtagagtcaggttatatctgggcgcagattattagtcaggaaacggctgactgcactgtaaaggctgtccttcaacttttgagcgcccacaatgtcaccgaactccaaacagacaatggacctaattttaagaatcagaaaatggagggggtattgaactatatgggggtaaaacataaattcggtattccagggaacccgcaatctcaggcgctggtggagaacgttaatcatacccttaaggtgtggattcggaagttcctgccagaaactactagcctggataacgccctgtcattggctgttcactcacttaattttaaacggaggggcagaataggcggaatggccccctacgaattgttggctcaacaagagagtcttaggatacaagattacttctcagcaataccccaaaaattgcaagcacagtggatttattacaaagatcagaaagataagaaatggaagggaccgatgcgagttgagtattgggggcaagggtctgttctccttaaggatgaagagaagggttacttcttgataccccggcggcatatacgacgggtgcccgaaccttgcgcactgcccgagggtgatgaagggggcgggggaagcggcggtggaggtagtggagggggaggatcagataaaaagtattctattggtttagccatcggcactaattccgttggatgggctgtcataaccgatgaatacaaagtaccttcaaagaaatttaaggtgttggggaacacagaccgtcattcgattaaaaagaatcttatcggtgccctcctattcgatagtggcgaaacggcagaggcgactcgcctgaaacgaaccgctcggagaaggtatacacgtcgcaagaaccgaatatgttacttacaagaaatttttagcaatgagatggccaaagttgacgattctttctttcaccgtttggaagagtccttccttgtcgaagaggacaagaaacatgaacggcaccccatctttggaaacatagtagatgaggtggcatatcatgaaaagtacccaacgatttatcacctcagaaaaaagctagttgactcaactgataaagcggacctgaggttaatctacttggctcttgcccatatgataaagttccgtgggcactttctcattgagggtgatctaaatccggacaactcggatgtcgacaaactgttcatccagttagtacaaacctataatcagttgtttgaagagaaccctataaatgcaagtggcgtggatgcgaaggctattcttagcgcccgcctctctaaatcccgacggctagaaaacctgatcgcacaattacccggagagaagaaaaatgggttgttcggtaaccttatagcgctctcactaggcctgacaccaaattttaagtcgaacttcgacttagctgaagatgccaaattgcagcttagtaaggacacgtacgatgacgatctcgacaatctactggcacaaattggagatcagtatgcggacttatttttggctgccaaaaaccttagcgatgcaatcctcctatctgacatactgagagttaatactgagattaccaaggcgccgttatccgcttcaatgatcaaaaggtacgatgaacatcaccaagacttgacacttctcaaggccctagtccgtcagcaactgcctgagaaatataaggaaatattctttgatcagtcgaaaaacgggtacgcaggttatattgacggcggagcgagtcaagaggaattctacaagtttatcaaacccatattagagaagatggatgggacggaagagttgcttgtaaaactcaatcgcgaagatctactgcgaaagcagcggactttcgacaacggtagcattccacatcaaatccacttaggcgaattgcatgctatacttagaaggcaggaggatttttatccgttcctcaaagacaatcgtgaaaagattgagaaaatcctaacctttcgcataccttactatgtgggacccctggcccgagggaactctcggttcgcatggatgacaagaaagtccgaagaaacgattactccatggaattttgaggaagttgtcgataaaggtgcgtcagctcaatcgttcatcgagaggatgaccaactttgacaagaatttaccgaacgaaaaagtattgcctaagcacagtttactttacgagtatttcacagtgtacaatgaactcacgaaagttaagtatgtcactgagggcatgcgtaaacccgcctttctaagcggagaacagaagaaagcaatagtagatctgttattcaagaccaaccgcaaagtgacagttaagcaattgaaagaggactactttaagaaaattgaatgcttcgattctgtcgagatctccggggtagaagatcgatttaatgcgtcacttggtacgtatcatgacctcctaaagataattaaagataaggacttcctggataacgaagagaatgaagatatcttagaagatatagtgttgactcttaccctctttgaagatcgggaaatgattgaggaaagactaaaaacatacgctcacctgttcgacgataaggttatgaaacagttaaagaggcgtcgctatacgggctggggacgattgtcgcggaaacttatcaacgggataagagacaagcaaagtggtaaaactattctcgattttctaaagagcgacggcttcgccaataggaactttatgcagctgatccatgatgactctttaaccttcaaagaggatatacaaaaggcacaggtttccggacaaggggactcattgcacgaacatattgcgaatcttgctggttcgccagccatcaaaaagggcatactccagacagtcaaagtagtggatgagctagttaaggtcatgggacgtcacaaaccggaaaacattgtaatcgagatggcacgcgaaaatcaaacgactcagaaggggcaaaaaaacagtcgagagcggatgaagagaatagaagagggtattaaagaactgggcagccagatcttaaaggagcatcctgtggaaaatacccaattgcagaacgagaaactttacctctattacctacaaaatggaagggacatgtatgttgatcaggaactggacataaaccgtttatctgattacgacgtcgatgccattgtaccccaatcctttttgaaggacgattcaatcgacaataaagtgcttacacgctcggataagaaccgagggaaaagtgacaatgttccaagcgaggaagtcgtaaagaaaatgaagaactattggcggcagctcctaaatgcgaaactgataacgcaaagaaagttcgataacttaactaaagctgagaggggtggcttgtctgaacttgacaaggccggatttattaaacgtcagctcgtggaaacccgccaaatcacaaagcatgttgcacagatactagattcccgaatgaatacgaaatacgacgagaacgataagctgattcgggaagtcaaagtaatcactttaaagtcaaaattggtgtcggacttcagaaaggattttcaattctataaagttagggagataaataactaccaccatgcgcacgacgcttatcttaatgccgtcgtagggaccgcactcattaagaaatacccgaagctagaaagtgagtttgtgtatggtgattacaaagtttatgacgtccgtaagatgatcgcgaaaagcgaacaggagataggcaaggctacagccaaatacttcttttattctaacattatgaatttctttaagacggaaatcactctggcaaacggagagatacgcaaacgacctttaattgaaaccaatggggagacaggtgaaatcgtatgggataagggccgggacttcgcgacggtgagaaaagttttgtccatgccccaagtcaacatagtaaagaaaactgaggtgcagaccggagggttttcaaaggaatcgattcttccaaaaaggaatagtgataagctcatcgctcgtaaaaaggactgggacccgaaaaagtacggtggcttcgatagccctacagttgcctattctgtcctagtagtggcaaaagttgagaagggaaaatccaagaaactgaagtcagtcaaagaattattggggataacgattatggagcgctcgtcttttgaaaagaaccccatcgacttccttgaggcgaaaggttacaaggaagtaaaaaaggatctcataattaaactaccaaagtatagtctgtttgagttagaaaatggccgaaaacggatgttggctagcgccggagagcttcaaaaggggaacgaactcgcactaccgtctaaatacgtgaatttcctgtatttagcgtcccattacgagaagttgaaaggttcacctgaagataacgaacagaagcaactttttgttgagcagcacaaacattatctcgacgaaatcatagagcaaatttcggaattcagtaagagagtcatcctagctgatgccaatctggacaaagtattaagcgcatacaacaagcacagggataaacccatacgtgagcaggcggaaaatattatccatttgtttactcttaccaacctcggcgctccagccgcattcaagtattttgacacaacgatagatcgcaaacgatacacttctaccaaggaggtgctagacgcgacactgattcaccaatccatcacgggattatatgaaactcggatagatttgtcacagcttgggggtgacaactcaaagaaaaggtcactggaggacaacgaaacggaaatcaaagtctccagagacacctggaacactaagaacatgcggtccctggaaccgccacgaagcaagaaacggatacat

SEQ ID NO: 245 - DNA, 4962 bp, Artificial Sequence
  chemically synthesized
atgcccaaaaagaagaggaaagtcagctctagttcttgggtagaccgaatagaggaggctgagattaaccacgaaaaattccacagcgaccctcagtatcttcgaaccgaatttaatttgcccaagatggtcgctgaagaaatccgacgaaagtgccctgtatgccgcatccggggcgaacaggtgggcggccagttgaagataggtcctggtatctggcagatggactgcacgcacttcgatggcaagatcatcctggtagggatacacgtagagtcaggttatatctgggcgcagattattagtcaggaaacggctgactgcactgtaaaggctgtccttcaacttttgagcgcccacaatgtcaccgaactccaaacagacaatggacctaattttaagaatcagaaaatggagggggtattgaactatatgggggtaaaacataaattcggtattccagggaacccgcaatctcaggcgctggtggagaacgttaatcatacccttaaggtgtggattcggaagttcctgccagaaactactagcctggataacgccctgtcattggctgttcactcacttaattttaaacggaggggcagaataggcggaatggccccctacgaattgttggctcaacaagagagtcttaggatacaagattacttctcagcaataccccaaaaattgcaagcagggggcgggggaagcggcggtggaggtagtggagggggaggatcagataaaaagtattctattggtttagccatcggcactaattccgttggatgggctgtcataaccgatgaatacaaagtaccttcaaagaaatttaaggtgttggggaacacagaccgtcattcgattaaaaagaatcttatcggtgccctcctattcgatagtggcgaaacggcagaggcgactcgcctgaaacgaaccgctcggagaaggtatacacgtcgcaagaaccgaatatgttacttacaagaaatttttagcaatgagatggccaaagttgacgattctttctttcaccgtttggaagagtccttccttgtcgaagaggacaagaaacatgaacggcaccccatctttggaaacatagtagatgaggtggcatatcatgaaaagtacccaacgatttatcacctcagaaaaaagctagttgactcaactgataaagcggacctgaggttaatctacttggctcttgcccatatgataaagttccgtgggcactttctcattgagggtgatctaaatccggacaactcggatgtcgacaaactgttcatccagttagtacaaacctataatcagttgtttgaagagaaccctataaatgcaagtggcgtggatgcgaaggctattcttagcgcccgcctctctaaatcccgacggctagaaaacctgatcgcacaattacccggagagaagaaaaatgggttgttcggtaaccttatagcgctctcactaggcctgacaccaaattttaagtcgaacttcgacttagctgaagatgccaaattgcagcttagtaaggacacgtacgatgacgatctcgacaatctactggcacaaattggagatcagtatgcggacttatttttggctgccaaaaaccttagcgatgcaatcctcctatctgacatactgagagttaatactgagattaccaaggcgccgttatccgcttcaatgatcaaaaggtacgatgaacatcaccaagacttgacacttctcaaggccctagtccgtcagcaactgcctgagaaatataaggaaatattctttgatcagtcgaaaaacgggtacgcaggttatattgacggcggagcgagtcaagaggaattctacaagtttatcaaacccatattagagaagatggatgggacggaagagttgcttgtaaaactcaatcgcgaagatctactgcgaaagcagcggactttcgacaacggtagcattccacatcaaatccacttaggcgaattgcatgctatacttagaaggcaggaggatttttatccgttcctcaaagacaatcgtgaaaagattgagaaaatcctaacctttcgcataccttactatgtgggacccctggcccgagggaactctcggttcgcatggatgacaagaaagtccgaagaaacgattactccatggaattttgaggaagttgtcgataaaggtgcgtcagctcaatcgttcatcgagaggatgaccaactttgacaagaatttaccgaacgaaaaagtattgcctaagcacagtttactttacgagtatttcacagtgtacaatgaactcacgaaagttaagtatgtcactgagggcatgcgtaaacccgcctttctaagcggagaacagaagaaagcaatagtagatctgttattcaagaccaaccgcaaagtgacagttaagcaattgaaagaggactactttaagaaaattgaatgcttcgattctgtcgagatctccggggtagaagatcgatttaatgcgtcacttggtacgtatcatgacctcctaaagataattaaagataaggacttcctggataacgaagagaatgaagatatcttagaagatatagtgttgactcttaccctctttgaagatcgggaaatgattgaggaaagactaaaaacatacgctcacctgttcgacgataaggttatgaaacagttaaagaggcgtcgctatacgggctggggacgattgtcgcggaaacttatcaacgggataagagacaagcaaagtggtaaaactattctcgattttctaaagagcgacggcttcgccaataggaactttatgcagctgatccatgatgactctttaaccttcaaagaggatatacaaaaggcacaggtttccggacaaggggactcattgcacgaacatattgcgaatcttgctggttcgccagccatcaaaaagggcatactccagacagtcaaagtagtggatgagctagttaaggtcatgggacgtcacaaaccggaaaacattgtaatcgagatggcacgcgaaaatcaaacgactcagaaggggcaaaaaaacagtcgagagcggatgaagagaatagaagagggtattaaagaactgggcagccagatcttaaaggagcatcctgtggaaaatacccaattgcagaacgagaaactttacctctattacctacaaaatggaagggacatgtatgttgatcaggaactggacataaaccgtttatctgattacgacgtcgatgccattgtaccccaatcctttttgaaggacgattcaatcgacaataaagtgcttacacgctcggataagaaccgagggaaaagtgacaatgttccaagcgaggaagtcgtaaagaaaatgaagaactattggcggcagctcctaaatgcgaaactgataacgcaaagaaagttcgataacttaactaaagctgagaggggtggcttgtctgaacttgacaaggccggatttattaaacgtcagctcgtggaaacccgccaaatcacaaagcatgttgcacagatactagattcccgaatgaatacgaaatacgacgagaacgataagctgattcgggaagtcaaagtaatcactttaaagtcaaaattggtgtcggacttcagaaaggattttcaattctataaagttagggagataaataactaccaccatgcgcacgacgcttatcttaatgccgtcgtagggaccgcactcattaagaaatacccgaagctagaaagtgagtttgtgtatggtgattacaaagtttatgacgtccgtaagatgatcgcgaaaagcgaacaggagataggcaaggctacagccaaatacttcttttattctaacattatgaatttctttaagacggaaatcactctggcaaacggagagatacgcaaacgacctttaattgaaaccaatggggagacaggtgaaatcgtatgggataagggccgggacttcgcgacggtgagaaaagttttgtccatgccccaagtcaacatagtaaagaaaactgaggtgcagaccggagggttttcaaaggaatcgattcttccaaaaaggaatagtgataagctcatcgctcgtaaaaaggactgggacccgaaaaagtacggtggcttcgatagccctacagttgcctattctgtcctagtagtggcaaaagttgagaagggaaaatccaagaaactgaagtcagtcaaagaattattggggataacgattatggagcgctcgtcttttgaaaagaaccccatcgacttccttgaggcgaaaggttacaaggaagtaaaaaaggatctcataattaaactaccaaagtatagtctgtttgagttagaaaatggccgaaaacggatgttggctagcgccggagagcttcaaaaggggaacgaactcgcactaccgtctaaatacgtgaatttcctgtatttagcgtcccattacgagaagttgaaaggttcacctgaagataacgaacagaagcaactttttgttgagcagcacaaacattatctcgacgaaatcatagagcaaatttcggaattcagtaagagagtcatcctagctgatgccaatctggacaaagtattaagcgcatacaacaagcacagggataaacccatacgtgagcaggcggaaaatattatccatttgtttactcttaccaacctcggcgctccagccgcattcaagtattttgacacaacgatagatcgcaaacgatacacttctaccaaggaggtgctagacgcgacactgattcaccaatccatcacgggattatatgaaactcggatagatttgtcacagcttgggggtgacaactcaaagaaaaggtcactggaggacaacgaaacggaaatcaaagtctccagagacacctggaacactaagaacatgcggtccctggaaccgccacgaagcaagaaacggatacat

SEQ ID NO: 246 - DNA, 5136 bp, Artificial Sequence
  chemically synthesized
atgcccaaaaagaagaggaaagtcagctctacctgctttctcgaaaacattccatctgccactgaggatcacgaaaggtggcatacttcccccgacatcttggtccgacaatttcacctccctaaaagaatagcaaaagagatcgtagcacggtgccaggaatgtaaacgcaccacaacttctccggtccggggtacgaaccccagagggcgcttcttgtggcaaatggataatactcactggaataagacgataatatgggttgcagtcgagacaaattccggtctcgtggaagcgcaagttatcccggaggagaccgcactgcaagtagccttgtgtatccttcaacttattcaacgatacacggtcttgcatctccattctgacaatgggccctgttttactgcacatagaatagaaaacttgtgtaaatacctcggtattactaagactacgggtatcccatataatcctcagtcacagggcgtagtggagcgagcgcatcgggaccttaaagacagattggcagcctatcagggagactgcgaaacagtagaagccgcgctgagtcttgcattggtgtccctgaataaaaagcgggggggcataggaggccatacaccgtatgagatttacctggagtccgagcacacaaagtaccaagatcagttggagcagcagttctcaaagcaaaagatcgaaaaatggtgctacgtgaggaacaggaggaaggagtggaagggaccgtacaaggtcttgtgggatggggatggagccgcggtcatcgaggaggagggaaaaacagcactttatccacaccgacacatgcggttcatcccaccgcccgactccgacattcaagacgggagttcagggggcgggggaagcggcggtggaggtagtggagggggaggatcagataaaaagtattctattggtttagccatcggcactaattccgttggatgggctgtcataaccgatgaatacaaagtaccttcaaagaaatttaaggtgttggggaacacagaccgtcattcgattaaaaagaatcttatcggtgccctcctattcgatagtggcgaaacggcagaggcgactcgcctgaaacgaaccgctcggagaaggtatacacgtcgcaagaaccgaatatgttacttacaagaaatttttagcaatgagatggccaaagttgacgattctttctttcaccgtttggaagagtccttccttgtcgaagaggacaagaaacatgaacggcaccccatctttggaaacatagtagatgaggtggcatatcatgaaaagtacccaacgatttatcacctcagaaaaaagctagttgactcaactgataaagcggacctgaggttaatctacttggctcttgcccatatgataaagttccgtgggcactttctcattgagggtgatctaaatccggacaactcggatgtcgacaaactgttcatccagttagtacaaacctataatcagttgtttgaagagaaccctataaatgcaagtggcgtggatgcgaaggctattcttagcgcccgcctctctaaatcccgacggctagaaaacctgatcgcacaattacccggagagaagaaaaatgggttgttcggtaaccttatagcgctctcactaggcctgacaccaaattttaagtcgaacttcgacttagctgaagatgccaaattgcagcttagtaaggacacgtacgatgacgatctcgacaatctactggcacaaattggagatcagtatgcggacttatttttggctgccaaaaaccttagcgatgcaatcctcctatctgacatactgagagttaatactgagattaccaaggcgccgttatccgcttcaatgatcaaaaggtacgatgaacatcaccaagacttgacacttctcaaggccctagtccgtcagcaactgcctgagaaatataaggaaatattctttgatcagtcgaaaaacgggtacgcaggttatattgacggcggagcgagtcaagaggaattctacaagtttatcaaacccatattagagaagatggatgggacggaagagttgcttgtaaaactcaatcgcgaagatctactgcgaaagcagcggactttcgacaacggtagcattccacatcaaatccacttaggcgaattgcatgctatacttagaaggcaggaggatttttatccgttcctcaaagacaatcgtgaaaagattgagaaaatcctaacctttcgcataccttactatgtgggacccctggcccgagggaactctcggttcgcatggatgacaagaaagtccgaagaaacgattactccatggaattttgaggaagttgtcgataaaggtgcgtcagctcaatcgttcatcgagaggatgaccaactttgacaagaatttaccgaacgaaaaagtattgcctaagcacagtttactttacgagtatttcacagtgtacaatgaactcacgaaagttaagtatgtcactgagggcatgcgtaaacccgcctttctaagcggagaacagaagaaagcaatagtagatctgttattcaagaccaaccgcaaagtgacagttaagcaattgaaagaggactactttaagaaaattgaatgcttcgattctgtcgagatctccggggtagaagatcgatttaatgcgtcacttggtacgtatcatgacctcctaaagataattaaagataaggacttcctggataacgaagagaatgaagatatcttagaagatatagtgttgactcttaccctctttgaagatcgggaaatgattgaggaaagactaaaaacatacgctcacctgttcgacgataaggttatgaaacagttaaagaggcgtcgctatacgggctggggacgattgtcgcggaaacttatcaacgggataagagacaagcaaagtggtaaaactattctcgattttctaaagagcgacggcttcgccaataggaactttatgcagctgatccatgatgactctttaaccttcaaagaggatatacaaaaggcacaggtttccggacaaggggactcattgcacgaacatattgcgaatcttgctggttcgccagccatcaaaaagggcatactccagacagtcaaagtagtggatgagctagttaaggtcatgggacgtcacaaaccggaaaacattgtaatcgagatggcacgcgaaaatcaaacgactcagaaggggcaaaaaaacagtcgagagcggatgaagagaatagaagagggtattaaagaactgggcagccagatcttaaaggagcatcctgtggaaaatacccaattgcagaacgagaaactttacctctattacctacaaaatggaagggacatgtatgttgatcaggaactggacataaaccgtttatctgattacgacgtcgatgccattgtaccccaatcctttttgaaggacgattcaatcgacaataaagtgcttacacgctcggataagaaccgagggaaaagtgacaatgttccaagcgaggaagtcgtaaagaaaatgaagaactattggcggcagctcctaaatgcgaaactgataacgcaaagaaagttcgataacttaactaaagctgagaggggtggcttgtctgaacttgacaaggccggatttattaaacgtcagctcgtggaaacccgccaaatcacaaagcatgttgcacagatactagattcccgaatgaatacgaaatacgacgagaacgataagctgattcgggaagtcaaagtaatcactttaaagtcaaaattggtgtcggacttcagaaaggattttcaattctataaagttagggagataaataactaccaccatgcgcacgacgcttatcttaatgccgtcgtagggaccgcactcattaagaaatacccgaagctagaaagtgagtttgtgtatggtgattacaaagtttatgacgtccgtaagatgatcgcgaaaagcgaacaggagataggcaaggctacagccaaatacttcttttattctaacattatgaatttctttaagacggaaatcactctggcaaacggagagatacgcaaacgacctttaattgaaaccaatggggagacaggtgaaatcgtatgggataagggccgggacttcgcgacggtgagaaaagttttgtccatgccccaagtcaacatagtaaagaaaactgaggtgcagaccggagggttttcaaaggaatcgattcttccaaaaaggaatagtgataagctcatcgctcgtaaaaaggactgggacccgaaaaagtacggtggcttcgatagccctacagttgcctattctgtcctagtagtggcaaaagttgagaagggaaaatccaagaaactgaagtcagtcaaagaattattggggataacgattatggagcgctcgtcttttgaaaagaaccccatcgacttccttgaggcgaaaggttacaaggaagtaaaaaaggatctcataattaaactaccaaagtatagtctgtttgagttagaaaatggccgaaaacggatgttggctagcgccggagagcttcaaaaggggaacgaactcgcactaccgtctaaatacgtgaatttcctgtatttagcgtcccattacgagaagttgaaaggttcacctgaagataacgaacagaagcaactttttgttgagcagcacaaacattatctcgacgaaatcatagagcaaatttcggaattcagtaagagagtcatcctagctgatgccaatctggacaaagtattaagcgcatacaacaagcacagggataaacccatacgtgagcaggcggaaaatattatccatttgtttactcttaccaacctcggcgctccagccgcattcaagtattttgacacaacgatagatcgcaaacgatacacttctaccaaggaggtgctagacgcgacactgattcaccaatccatcacgggattatatgaaactcggatagatttgtcacagcttgggggtgacaactcaaagaaaaggtcactggaggacaacgaaacggaaatcaaagtctccagagacacctggaacactaagaacatgcggtccctggaaccgccacgaagcaagaaacggatacat

SEQ ID NO: 247 - DNA, 4965 bp, Artificial Sequence
  chemically synthesized
atgcccaaaaagaagaggaaagtcagctctacctgctttctcgaaaacattccatctgccactgaggatcacgaaaggtggcatacttcccccgacatcttggtccgacaatttcacctccctaaaagaatagcaaaagagatcgtagcacggtgccaggaatgtaaacgcaccacaacttctccggtccggggtacgaaccccagagggcgcttcttgtggcaaatggataatactcactggaataagacgataatatgggttgcagtcgagacaaattccggtctcgtggaagcgcaagttatcccggaggagaccgcactgcaagtagccttgtgtatccttcaacttattcaacgatacacggtcttgcatctccattctgacaatgggccctgttttactgcacatagaatagaaaacttgtgtaaatacctcggtattactaagactacgggtatcccatataatcctcagtcacagggcgtagtggagcgagcgcatcgggaccttaaagacagattggcagcctatcagggagactgcgaaacagtagaagccgcgctgagtcttgcattggtgtccctgaataaaaagcgggggggcataggaggccatacaccgtatgagatttacctggagtccgagcacacaaagtaccaagatcagttggagcagcagttctcaaagcaaaagatcgaagggggcgggggaagcggcggtggaggtagtggagggggaggatcagataaaaagtattctattggtttagccatcggcactaattccgttggatgggctgtcataaccgatgaatacaaagtaccttcaaagaaatttaaggtgttggggaacacagaccgtcattcgattaaaaagaatcttatcggtgccctcctattcgatagtggcgaaacggcagaggcgactcgcctgaaacgaaccgctcggagaaggtatacacgtcgcaagaaccgaatatgttacttacaagaaatttttagcaatgagatggccaaagttgacgattctttctttcaccgtttggaagagtccttccttgtcgaagaggacaagaaacatgaacggcaccccatctttggaaacatagtagatgaggtggcatatcatgaaaagtacccaacgatttatcacctcagaaaaaagctagttgactcaactgataaagcggacctgaggttaatctacttggctcttgcccatatgataaagttccgtgggcactttctcattgagggtgatctaaatccggacaactcggatgtcgacaaactgttcatccagttagtacaaacctataatcagttgtttgaagagaaccctataaatgcaagtggcgtggatgcgaaggctattcttagcgcccgcctctctaaatcccgacggctagaaaacctgatcgcacaattacccggagagaagaaaaatgggttgttcggtaaccttatagcgctctcactaggcctgacaccaaattttaagtcgaacttcgacttagctgaagatgccaaattgcagcttagtaaggacacgtacgatgacgatctcgacaatctactggcacaaattggagatcagtatgcggacttatttttggctgccaaaaaccttagcgatgcaatcctcctatctgacatactgagagttaatactgagattaccaaggcgccgttatccgcttcaatgatcaaaaggtacgatgaacatcaccaagacttgacacttctcaaggccctagtccgtcagcaactgcctgagaaatataaggaaatattctttgatcagtcgaaaaacgggtacgcaggttatattgacggcggagcgagtcaagaggaattctacaagtttatcaaacccatattagagaagatggatgggacggaagagttgcttgtaaaactcaatcgcgaagatctactgcgaaagcagcggactttcgacaacggtagcattccacatcaaatccacttaggcgaattgcatgctatacttagaaggcaggaggatttttatccgttcctcaaagacaatcgtgaaaagattgagaaaatcctaacctttcgcataccttactatgtgggacccctggcccgagggaactctcggttcgcatggatgacaagaaagtccgaagaaacgattactccatggaattttgaggaagttgtcgataaaggtgcgtcagctcaatcgttcatcgagaggatgaccaactttgacaagaatttaccgaacgaaaaagtattgcctaagcacagtttactttacgagtatttcacagtgtacaatgaactcacgaaagttaagtatgtcactgagggcatgcgtaaacccgcctttctaagcggagaacagaagaaagcaatagtagatctgttattcaagaccaaccgcaaagtgacagttaagcaattgaaagaggactactttaagaaaattgaatgcttcgattctgtcgagatctccggggtagaagatcgatttaatgcgtcacttggtacgtatcatgacctcctaaagataattaaagataaggacttcctggataacgaagagaatgaagatatcttagaagatatagtgttgactcttaccctctttgaagatcgggaaatgattgaggaaagactaaaaacatacgctcacctgttcgacgataaggttatgaaacagttaaagaggcgtcgctatacgggctggggacgattgtcgcggaaacttatcaacgggataagagacaagcaaagtggtaaaactattctcgattttctaaagagcgacggcttcgccaataggaactttatgcagctgatccatgatgactctttaaccttcaaagaggatatacaaaaggcacaggtttccggacaaggggactcattgcacgaacatattgcgaatcttgctggttcgccagccatcaaaaagggcatactccagacagtcaaagtagtggatgagctagttaaggtcatgggacgtcacaaaccggaaaacattgtaatcgagatggcacgcgaaaatcaaacgactcagaaggggcaaaaaaacagtcgagagcggatgaagagaatagaagagggtattaaagaactgggcagccagatcttaaaggagcatcctgtggaaaatacccaattgcagaacgagaaactttacctctattacctacaaaatggaagggacatgtatgttgatcaggaactggacataaaccgtttatctgattacgacgtcgatgccattgtaccccaatcctttttgaaggacgattcaatcgacaataaagtgcttacacgctcggataagaaccgagggaaaagtgacaatgttccaagcgaggaagtcgtaaagaaaatgaagaactattggcggcagctcctaaatgcgaaactgataacgcaaagaaagttcgataacttaactaaagctgagaggggtggcttgtctgaacttgacaaggccggatttattaaacgtcagctcgtggaaacccgccaaatcacaaagcatgttgcacagatactagattcccgaatgaatacgaaatacgacgagaacgataagctgattcgggaagtcaaagtaatcactttaaagtcaaaattggtgtcggacttcagaaaggattttcaattctataaagttagggagataaataactaccaccatgcgcacgacgcttatcttaatgccgtcgtagggaccgcactcattaagaaatacccgaagctagaaagtgagtttgtgtatggtgattacaaagtttatgacgtccgtaagatgatcgcgaaaagcgaacaggagataggcaaggctacagccaaatacttcttttattctaacattatgaatttctttaagacggaaatcactctggcaaacggagagatacgcaaacgacctttaattgaaaccaatggggagacaggtgaaatcgtatgggataagggccgggacttcgcgacggtgagaaaagttttgtccatgccccaagtcaacatagtaaagaaaactgaggtgcagaccggagggttttcaaaggaatcgattcttccaaaaaggaatagtgataagctcatcgctcgtaaaaaggactgggacccgaaaaagtacggtggcttcgatagccctacagttgcctattctgtcctagtagtggcaaaagttgagaagggaaaatccaagaaactgaagtcagtcaaagaattattggggataacgattatggagcgctcgtcttttgaaaagaaccccatcgacttccttgaggcgaaaggttacaaggaagtaaaaaaggatctcataattaaactaccaaagtatagtctgtttgagttagaaaatggccgaaaacggatgttggctagcgccggagagcttcaaaaggggaacgaactcgcactaccgtctaaatacgtgaatttcctgtatttagcgtcccattacgagaagttgaaaggttcacctgaagataacgaacagaagcaactttttgttgagcagcacaaacattatctcgacgaaatcatagagcaaatttcggaattcagtaagagagtcatcctagctgatgccaatctggacaaagtattaagcgcatacaacaagcacagggataaacccatacgtgagcaggcggaaaatattatccatttgtttactcttaccaacctcggcgctccagccgcattcaagtattttgacacaacgatagatcgcaaacgatacacttctaccaaggaggtgctagacgcgacactgattcaccaatccatcacgggattatatgaaactcggatagatttgtcacagcttgggggtgacaactcaaagaaaaggtcactggaggacaacgaaacggaaatcaaagtctccagagacacctggaacactaagaacatgcggtccctggaaccgccacgaagcaagaaacggatacat

SEQ ID NO: 248 - DNA, 5094 bp, Artificial Sequence
  chemically synthesized
atgcccaaaaagaagaggaaagtcagctctaatgtgcatacgtcagagtcaaccagaaagtacccctacccgttcattcataggatgttggcccatgcaaacgcgcagactatcaggtattctctcaagaataatacgatcacgtatttcaatgagagtgatgtggactggtcctccgcgattgactatcaatgcccggactgcctgattgggaagagtaccaaacatcgccatatcaagggaagtaggctcaaatatcagaacagctatgaaccttttcagtatctgcatacagacatattcgggccagtgcacaacctgccaaaaagcgctcctagctatttcattagtttcaccgacgaaacaacaaagtttaggtgggtttatccactgcacgacaggagggaagacagcatactcgatgtcttcacgacaattctggcgtttatcaagaatcagttccaagcgagcgtgttggtgatacagatggatagaggcagcgaatatactaaccgaactcttcacaaattcttggagaagaacgggataactccttgttacacaacaacagcagattcacgcgcacacggcgtcgcggagcggctcaacaggactctcctggacgattgccgcactcaactccagtgttcagggctcccaaaccatctctggttttctgccatagagttttctactatagtgcgcaattccctcgcgagcccaaaatctaagaaaagcgcgaggcaacatgcaggactggctggccttgacatctccacactgctgccttttggtcagccggtaattgtcaatgaccataaccccaacagcgggggcgggggaagcggcggtggaggtagtggagggggaggatcagataaaaagtattctattggtttagccatcggcactaattccgttggatgggctgtcataaccgatgaatacaaagtaccttcaaagaaatttaaggtgttggggaacacagaccgtcattcgattaaaaagaatcttatcggtgccctcctattcgatagtggcgaaacggcagaggcgactcgcctgaaacgaaccgctcggagaaggtatacacgtcgcaagaaccgaatatgttacttacaagaaatttttagcaatgagatggccaaagttgacgattctttctttcaccgtttggaagagtccttccttgtcgaagaggacaagaaacatgaacggcaccccatctttggaaacatagtagatgaggtggcatatcatgaaaagtacccaacgatttatcacctcagaaaaaagctagttgactcaactgataaagcggacctgaggttaatctacttggctcttgcccatatgataaagttccgtgggcactttctcattgagggtgatctaaatccggacaactcggatgtcgacaaactgttcatccagttagtacaaacctataatcagttgtttgaagagaaccctataaatgcaagtggcgtggatgcgaaggctattcttagcgcccgcctctctaaatcccgacggctagaaaacctgatcgcacaattacccggagagaagaaaaatgggttgttcggtaaccttatagcgctctcactaggcctgacaccaaattttaagtcgaacttcgacttagctgaagatgccaaattgcagcttagtaaggacacgtacgatgacgatctcgacaatctactggcacaaattggagatcagtatgcggacttatttttggctgccaaaaaccttagcgatgcaatcctcctatctgacatactgagagttaatactgagattaccaaggcgccgttatccgcttcaatgatcaaaaggtacgatgaacatcaccaagacttgacacttctcaaggccctagtccgtcagcaactgcctgagaaatataaggaaatattctttgatcagtcgaaaaacgggtacgcaggttatattgacggcggagcgagtcaagaggaattctacaagtttatcaaacccatattagagaagatggatgggacggaagagttgcttgtaaaactcaatcgcgaagatctactgcgaaagcagcggactttcgacaacggtagcattccacatcaaatccacttaggcgaattgcatgctatacttagaaggcaggaggatttttatccgttcctcaaagacaatcgtgaaaagattgagaaaatcctaacctttcgcataccttactatgtgggacccctggcccgagggaactctcggttcgcatggatgacaagaaagtccgaagaaacgattactccatggaattttgaggaagttgtcgataaaggtgcgtcagctcaatcgttcatcgagaggatgaccaactttgacaagaatttaccgaacgaaaaagtattgcctaagcacagtttactttacgagtatttcacagtgtacaatgaactcacgaaagttaagtatgtcactgagggcatgcgtaaacccgcctttctaagcggagaacagaagaaagcaatagtagatctgttattcaagaccaaccgcaaagtgacagttaagcaattgaaagaggactactttaagaaaattgaatgcttcgattctgtcgagatctccggggtagaagatcgatttaatgcgtcacttggtacgtatcatgacctcctaaagataattaaagataaggacttcctggataacgaagagaatgaagatatcttagaagatatagtgttgactcttaccctctttgaagatcgggaaatgattgaggaaagactaaaaacatacgctcacctgttcgacgataaggttatgaaacagttaaagaggcgtcgctatacgggctggggacgattgtcgcggaaacttatcaacgggataagagacaagcaaagtggtaaaactattctcgattttctaaagagcgacggcttcgccaataggaactttatgcagctgatccatgatgactctttaaccttcaaagaggatatacaaaaggcacaggtttccggacaaggggactcattgcacgaacatattgcgaatcttgctggttcgccagccatcaaaaagggcatactccagacagtcaaagtagtggatgagctagttaaggtcatgggacgtcacaaaccggaaaacattgtaatcgagatggcacgcgaaaatcaaacgactcagaaggggcaaaaaaacagtcgagagcggatgaagagaatagaagagggtattaaagaactgggcagccagatcttaaaggagcatcctgtggaaaatacccaattgcagaacgagaaactttacctctattacctacaaaatggaagggacatgtatgttgatcaggaactggacataaaccgtttatctgattacgacgtcgatgccattgtaccccaatcctttttgaaggacgattcaatcgacaataaagtgcttacacgctcggataagaaccgagggaaaagtgacaatgttccaagcgaggaagtcgtaaagaaaatgaagaactattggcggcagctcctaaatgcgaaactgataacgcaaagaaagttcgataacttaactaaagctgagaggggtggcttgtctgaacttgacaaggccggatttattaaacgtcagctcgtggaaacccgccaaatcacaaagcatgttgcacagatactagattcccgaatgaatacgaaatacgacgagaacgataagctgattcgggaagtcaaagtaatcactttaaagtcaaaattggtgtcggacttcagaaaggattttcaattctataaagttagggagataaataactaccaccatgcgcacgacgcttatcttaatgccgtcgtagggaccgcactcattaagaaatacccgaagctagaaagtgagtttgtgtatggtgattacaaagtttatgacgtccgtaagatgatcgcgaaaagcgaacaggagataggcaaggctacagccaaatacttcttttattctaacattatgaatttctttaagacggaaatcactctggcaaacggagagatacgcaaacgacctttaattgaaaccaatggggagacaggtgaaatcgtatgggataagggccgggacttcgcgacggtgagaaaagttttgtccatgccccaagtcaacatagtaaagaaaactgaggtgcagaccggagggttttcaaaggaatcgattcttccaaaaaggaatagtgataagctcatcgctcgtaaaaaggactgggacccgaaaaagtacggtggcttcgatagccctacagttgcctattctgtcctagtagtggcaaaagttgagaagggaaaatccaagaaactgaagtcagtcaaagaattattggggataacgattatggagcgctcgtcttttgaaaagaaccccatcgacttccttgaggcgaaaggttacaaggaagtaaaaaaggatctcataattaaactaccaaagtatagtctgtttgagttagaaaatggccgaaaacggatgttggctagcgccggagagcttcaaaaggggaacgaactcgcactaccgtctaaatacgtgaatttcctgtatttagcgtcccattacgagaagttgaaaggttcacctgaagataacgaacagaagcaactttttgttgagcagcacaaacattatctcgacgaaatcatagagcaaatttcggaattcagtaagagagtcatcctagctgatgccaatctggacaaagtattaagcgcatacaacaagcacagggataaacccatacgtgagcaggcggaaaatattatccatttgtttactcttaccaacctcggcgctccagccgcattcaagtattttgacacaacgatagatcgcaaacgatacacttctaccaaggaggtgctagacgcgacactgattcaccaatccatcacgggattatatgaaactcggatagatttgtcacagcttgggggtgacaactcaaagaaaaggtcactggaggacaacgaaacggaaatcaaagtctccagagacacctggaacactaagaacatgcggtccctggaaccgccacgaagcaagaaacggatacat

SEQ ID NO: 249 - DNA, 5154 bp, Artificial Sequence
  chemically synthesized
atgcccaaaaagaagaggaaagtcagctctaaatacgtctttattgaaaagcaccaggccgaattttccatcaaagctatgtgtagagtcttgagagttgcaagaagcggctggtacacctggtgtcagaggagaactcgcatatccacgcggcagcagtttcgacaacactgcgattccgtggtgttggccgcatttacgcgatcaaaacaaagatacggcgcacctcgccttaccgacgaactcagggcccaaggatacccatttaatgtgaaaacagttgcggccagtctgcgcaggcaagggctgcgcgctaaggcgagtagaaaatttagccccgtctcttatcgcgcacacggccttcccgtcagcgagaatcttcttgagcaagatttttacgcgtcaggccctaatcaaaagtgggccggggacataacgtatcttagaacagacgagggttggctctatctcgccgtcgtcattgacttgtggagtagggcggtcatagggtggagcatgtcaccacgcatgacagcccaactcgcgtgtgatgccctccaaatggctctgtggaggaggaagcgcccacgcaatgtgattgtgcacaccgatagaggcgggcagtattgtagcgccgattatcaggcgcagttgaagcgccataaccttcgaggtagcatgtccgcgaagggttgttgctatgacaatgcgtgcgtagaatcattctttcatagtttgaaggttgagtgcatccacggggagcattttatctcccgcgaaattatgagggcgacggtctttaactacatcgaatgcgattataatcggtggaggcgacactcttggtgtggtggtcttagcccggagcaatttgaaaacaaaaacctcgccgggggcgggggaagcggcggtggaggtagtggagggggaggatcagataaaaagtattctattggtttagccatcggcactaattccgttggatgggctgtcataaccgatgaatacaaagtaccttcaaagaaatttaaggtgttggggaacacagaccgtcattcgattaaaaagaatcttatcggtgccctcctattcgatagtggcgaaacggcagaggcgactcgcctgaaacgaaccgctcggagaaggtatacacgtcgcaagaaccgaatatgttacttacaagaaatttttagcaatgagatggccaaagttgacgattctttctttcaccgtttggaagagtccttccttgtcgaagaggacaagaaacatgaacggcaccccatctttggaaacatagtagatgaggtggcatatcatgaaaagtacccaacgatttatcacctcagaaaaaagctagttgactcaactgataaagcggacctgaggttaatctacttggctcttgcccatatgataaagttccgtgggcactttctcattgagggtgatctaaatccggacaactcggatgtcgacaaactgttcatccagttagtacaaacctataatcagttgtttgaagagaaccctataaatgcaagtggcgtggatgcgaaggctattcttagcgcccgcctctctaaatcccgacggctagaaaacctgatcgcacaattacccggagagaagaaaaatgggttgttcggtaaccttatagcgctctcactaggcctgacaccaaattttaagtcgaacttcgacttagctgaagatgccaaattgcagcttagtaaggacacgtacgatgacgatctcgacaatctactggcacaaattggagatcagtatgcggacttatttttggctgccaaaaaccttagcgatgcaatcctcctatctgacatactgagagttaatactgagattaccaaggcgccgttatccgcttcaatgatcaaaaggtacgatgaacatcaccaagacttgacacttctcaaggccctagtccgtcagcaactgcctgagaaatataaggaaatattctttgatcagtcgaaaaacgggtacgcaggttatattgacggcggagcgagtcaagaggaattctacaagtttatcaaacccatattagagaagatggatgggacggaagagttgcttgtaaaactcaatcgcgaagatctactgcgaaagcagcggactttcgacaacggtagcattccacatcaaatccacttaggcgaattgcatgctatacttagaaggcaggaggatttttatccgttcctcaaagacaatcgtgaaaagattgagaaaatcctaacctttcgcataccttactatgtgggacccctggcccgagggaactctcggttcgcatggatgacaagaaagtccgaagaaacgattactccatggaattttgaggaagttgtcgataaaggtgcgtcagctcaatcgttcatcgagaggatgaccaactttgacaagaatttaccgaacgaaaaagtattgcctaagcacagtttactttacgagtatttcacagtgtacaatgaactcacgaaagttaagtatgtcactgagggcatgcgtaaacccgcctttctaagcggagaacagaagaaagcaatagtagatctgttattcaagaccaaccgcaaagtgacagttaagcaattgaaagaggactactttaagaaaattgaatgcttcgattctgtcgagatctccggggtagaagatcgatttaatgcgtcacttggtacgtatcatgacctcctaaagataattaaagataaggacttcctggataacgaagagaatgaagatatcttagaagatatagtgttgactcttaccctctttgaagatcgggaaatgattgaggaaagactaaaaacatacgctcacctgttcgacgataaggttatgaaacagttaaagaggcgtcgctatacgggctggggacgattgtcgcggaaacttatcaacgggataagagacaagcaaagtggtaaaactattctcgattttctaaagagcgacggcttcgccaataggaactttatgcagctgatccatgatgactctttaaccttcaaagaggatatacaaaaggcacaggtttccggacaaggggactcattgcacgaacatattgcgaatcttgctggttcgccagccatcaaaaagggcatactccagacagtcaaagtagtggatgagctagttaaggtcatgggacgtcacaaaccggaaaacattgtaatcgagatggcacgcgaaaatcaaacgactcagaaggggcaaaaaaacagtcgagagcggatgaagagaatagaagagggtattaaagaactgggcagccagatcttaaaggagcatcctgtggaaaatacccaattgcagaacgagaaactttacctctattacctacaaaatggaagggacatgtatgttgatcaggaactggacataaaccgtttatctgattacgacgtcgatgccattgtaccccaatcctttttgaaggacgattcaatcgacaataaagtgcttacacgctcggataagaaccgagggaaaagtgacaatgttccaagcgaggaagtcgtaaagaaaatgaagaactattggcggcagctcctaaatgcgaaactgataacgcaaagaaagttcgataacttaactaaagctgagaggggtggcttgtctgaacttgacaaggccggatttattaaacgtcagctcgtggaaacccgccaaatcacaaagcatgttgcacagatactagattcccgaatgaatacgaaatacgacgagaacgataagctgattcgggaagtcaaagtaatcactttaaagtcaaaattggtgtcggacttcagaaaggattttcaattctataaagttagggagataaataactaccaccatgcgcacgacgcttatcttaatgccgtcgtagggaccgcactcattaagaaatacccgaagctagaaagtgagtttgtgtatggtgattacaaagtttatgacgtccgtaagatgatcgcgaaaagcgaacaggagataggcaaggctacagccaaatacttcttttattctaacattatgaatttctttaagacggaaatcactctggcaaacggagagatacgcaaacgacctttaattgaaaccaatggggagacaggtgaaatcgtatgggataagggccgggacttcgcgacggtgagaaaagttttgtccatgccccaagtcaacatagtaaagaaaactgaggtgcagaccggagggttttcaaaggaatcgattcttccaaaaaggaatagtgataagctcatcgctcgtaaaaaggactgggacccgaaaaagtacggtggcttcgatagccctacagttgcctattctgtcctagtagtggcaaaagttgagaagggaaaatccaagaaactgaagtcagtcaaagaattattggggataacgattatggagcgctcgtcttttgaaaagaaccccatcgacttccttgaggcgaaaggttacaaggaagtaaaaaaggatctcataattaaactaccaaagtatagtctgtttgagttagaaaatggccgaaaacggatgttggctagcgccggagagcttcaaaaggggaacgaactcgcactaccgtctaaatacgtgaatttcctgtatttagcgtcccattacgagaagttgaaaggttcacctgaagataacgaacagaagcaactttttgttgagcagcacaaacattatctcgacgaaatcatagagcaaatttcggaattcagtaagagagtcatcctagctgatgccaatctggacaaagtattaagcgcatacaacaagcacagggataaacccatacgtgagcaggcggaaaatattatccatttgtttactcttaccaacctcggcgctccagccgcattcaagtattttgacacaacgatagatcgcaaacgatacacttctaccaaggaggtgctagacgcgacactgattcaccaatccatcacgggattatatgaaactcggatagatttgtcacagcttgggggtgacaactcaaagaaaaggtcactggaggacaacgaaacggaaatcaaagtctccagagacacctggaacactaagaacatgcggtccctggaaccgccacgaagcaagaaacggatacat

SEQ ID NO: 250 - DNA, 4818 bp, Artificial Sequence
  chemically synthesized
atgcccaaaaagaagaggaaagtcagctctgtcagcgagaatcttcttgagcaagatttttacgcgtcaggccctaatcaaaagtgggccggggacataacgtatcttagaacagacgagggttggctctatctcgccgtcgtcattgacttgtggagtagggcggtcatagggtggagcatgtcaccacgcatgacagcccaactcgcgtgtgatgccctccaaatggctctgtggaggaggaagcgcccacgcaatgtgattgtgcacaccgatagaggcgggcagtattgtagcgccgattatcaggcgcagttgaagcgccataaccttcgaggtagcatgtccgcgaagggttgttgctatgacaatgcgtgcgtagaatcattctttcatagtttgaaggttgagtgcatccacggggagcattttatctcccgcgaaattatgagggcgacggtctttaactacatcgaatgcgattataatcggtggaggcgacactcttggtgtggtggtcttagcccggagcaatttgaaaacaaaaacctcgccgggggcgggggaagcggcggtggaggtagtggagggggaggatcagataaaaagtattctattggtttagccatcggcactaattccgttggatgggctgtcataaccgatgaatacaaagtaccttcaaagaaatttaaggtgttggggaacacagaccgtcattcgattaaaaagaatcttatcggtgccctcctattcgatagtggcgaaacggcagaggcgactcgcctgaaacgaaccgctcggagaaggtatacacgtcgcaagaaccgaatatgttacttacaagaaatttttagcaatgagatggccaaagttgacgattctttctttcaccgtttggaagagtccttccttgtcgaagaggacaagaaacatgaacggcaccccatctttggaaacatagtagatgaggtggcatatcatgaaaagtacccaacgatttatcacctcagaaaaaagctagttgactcaactgataaagcggacctgaggttaatctacttggctcttgcccatatgataaagttccgtgggcactttctcattgagggtgatctaaatccggacaactcggatgtcgacaaactgttcatccagttagtacaaacctataatcagttgtttgaagagaaccctataaatgcaagtggcgtggatgcgaaggctattcttagcgcccgcctctctaaatcccgacggctagaaaacctgatcgcacaattacccggagagaagaaaaatgggttgttcggtaaccttatagcgctctcactaggcctgacaccaaattttaagtcgaacttcgacttagctgaagatgccaaattgcagcttagtaaggacacgtacgatgacgatctcgacaatctactggcacaaattggagatcagtatgcggacttatttttggctgccaaaaaccttagcgatgcaatcctcctatctgacatactgagagttaatactgagattaccaaggcgccgttatccgcttcaatgatcaaaaggtacgatgaacatcaccaagacttgacacttctcaaggccctagtccgtcagcaactgcctgagaaatataaggaaatattctttgatcagtcgaaaaacgggtacgcaggttatattgacggcggagcgagtcaagaggaattctacaagtttatcaaacccatattagagaagatggatgggacggaagagttgcttgtaaaactcaatcgcgaagatctactgcgaaagcagcggactttcgacaacggtagcattccacatcaaatccacttaggcgaattgcatgctatacttagaaggcaggaggatttttatccgttcctcaaagacaatcgtgaaaagattgagaaaatcctaacctttcgcataccttactatgtgggacccctggcccgagggaactctcggttcgcatggatgacaagaaagtccgaagaaacgattactccatggaattttgaggaagttgtcgataaaggtgcgtcagctcaatcgttcatcgagaggatgaccaactttgacaagaatttaccgaacgaaaaagtattgcctaagcacagtttactttacgagtatttcacagtgtacaatgaactcacgaaagttaagtatgtcactgagggcatgcgtaaacccgcctttctaagcggagaacagaagaaagcaatagtagatctgttattcaagaccaaccgcaaagtgacagttaagcaattgaaagaggactactttaagaaaattgaatgcttcgattctgtcgagatctccggggtagaagatcgatttaatgcgtcacttggtacgtatcatgacctcctaaagataattaaagataaggacttcctggataacgaagagaatgaagatatcttagaagatatagtgttgactcttaccctctttgaagatcgggaaatgattgaggaaagactaaaaacatacgctcacctgttcgacgataaggttatgaaacagttaaagaggcgtcgctatacgggctggggacgattgtcgcggaaacttatcaacgggataagagacaagcaaagtggtaaaactattctcgattttctaaagagcgacggcttcgccaataggaactttatgcagctgatccatgatgactctttaaccttcaaagaggatatacaaaaggcacaggtttccggacaaggggactcattgcacgaacatattgcgaatcttgctggttcgccagccatcaaaaagggcatactccagacagtcaaagtagtggatgagctagttaaggtcatgggacgtcacaaaccggaaaacattgtaatcgagatggcacgcgaaaatcaaacgactcagaaggggcaaaaaaacagtcgagagcggatgaagagaatagaagagggtattaaagaactgggcagccagatcttaaaggagcatcctgtggaaaatacccaattgcagaacgagaaactttacctctattacctacaaaatggaagggacatgtatgttgatcaggaactggacataaaccgtttatctgattacgacgtcgatgccattgtaccccaatcctttttgaaggacgattcaatcgacaataaagtgcttacacgctcggataagaaccgagggaaaagtgacaatgttccaagcgaggaagtcgtaaagaaaatgaagaactattggcggcagctcctaaatgcgaaactgataacgcaaagaaagttcgataacttaactaaagctgagaggggtggcttgtctgaacttgacaaggccggatttattaaacgtcagctcgtggaaacccgccaaatcacaaagcatgttgcacagatactagattcccgaatgaatacgaaatacgacgagaacgataagctgattcgggaagtcaaagtaatcactttaaagtcaaaattggtgtcggacttcagaaaggattttcaattctataaagttagggagataaataactaccaccatgcgcacgacgcttatcttaatgccgtcgtagggaccgcactcattaagaaatacccgaagctagaaagtgagtttgtgtatggtgattacaaagtttatgacgtccgtaagatgatcgcgaaaagcgaacaggagataggcaaggctacagccaaatacttcttttattctaacattatgaatttctttaagacggaaatcactctggcaaacggagagatacgcaaacgacctttaattgaaaccaatggggagacaggtgaaatcgtatgggataagggccgggacttcgcgacggtgagaaaagttttgtccatgccccaagtcaacatagtaaagaaaactgaggtgcagaccggagggttttcaaaggaatcgattcttccaaaaaggaatagtgataagctcatcgctcgtaaaaaggactgggacccgaaaaagtacggtggcttcgatagccctacagttgcctattctgtcctagtagtggcaaaagttgagaagggaaaatccaagaaactgaagtcagtcaaagaattattggggataacgattatggagcgctcgtcttttgaaaagaaccccatcgacttccttgaggcgaaaggttacaaggaagtaaaaaaggatctcataattaaactaccaaagtatagtctgtttgagttagaaaatggccgaaaacggatgttggctagcgccggagagcttcaaaaggggaacgaactcgcactaccgtctaaatacgtgaatttcctgtatttagcgtcccattacgagaagttgaaaggttcacctgaagataacgaacagaagcaactttttgttgagcagcacaaacattatctcgacgaaatcatagagcaaatttcggaattcagtaagagagtcatcctagctgatgccaatctggacaaagtattaagcgcatacaacaagcacagggataaacccatacgtgagcaggcggaaaatattatccatttgtttactcttaccaacctcggcgctccagccgcattcaagtattttgacacaacgatagatcgcaaacgatacacttctaccaaggaggtgctagacgcgacactgattcaccaatccatcacgggattatatgaaactcggatagatttgtcacagcttgggggtgacaactcaaagaaaaggtcactggaggacaacgaaacggaaatcaaagtctccagagacacctggaacactaagaacatgcggtccctggaaccgccacgaagcaagaaacggatacat

SEQ ID NO: 251 - DNA, 5019 bp, Artificial Sequence
  chemically synthesized
atggactacaaagaccatgacggtgattataaagatcatgacatcgattacaaggatgacgatgacaagggcggaaactcaaagaaaaggtcactggaggacaacgaaacggaaatcaaagtctccagagacacctggaacactaagaacatgcggtccctggaaccgccacgaagcaagaaacggatacatggaggcgataaaaagtattctattggtttagccatcggcactaattccgttggatgggctgtcataaccgatgaatacaaagtaccttcaaagaaatttaaggtgttggggaacacagaccgtcattcgattaaaaagaatcttatcggtgccctcctattcgatagtggcgaaacggcagaggcgactcgcctgaaacgaaccgctcggagaaggtatacacgtcgcaagaaccgaatatgttacttacaagaaatttttagcaatgagatggccaaagttgacgattctttctttcaccgtttggaagagtccttccttgtcgaagaggacaagaaacatgaacggcaccccatctttggaaacatagtagatgaggtggcatatcatgaaaagtacccaacgatttatcacctcagaaaaaagctagttgactcaactgataaagcggacctgaggttaatctacttggctcttgcccatatgataaagttccgtgggcactttctcattgagggtgatctaaatccggacaactcggatgtcgacaaactgttcatccagttagtacaaacctataatcagttgtttgaagagaaccctataaatgcaagtggcgtggatgcgaaggctattcttagcgcccgcctctctaaatcccgacggctagaaaacctgatcgcacaattacccggagagaagaaaaatgggttgttcggtaaccttatagcgctctcactaggcctgacaccaaattttaagtcgaacttcgacttagctgaagatgccaaattgcagcttagtaaggacacgtacgatgacgatctcgacaatctactggcacaaattggagatcagtatgcggacttatttttggctgccaaaaaccttagcgatgcaatcctcctatctgacatactgagagttaatactgagattaccaaggcgccgttatccgcttcaatgatcaaaaggtacgatgaacatcaccaagacttgacacttctcaaggccctagtccgtcagcaactgcctgagaaatataaggaaatattctttgatcagtcgaaaaacgggtacgcaggttatattgacggcggagcgagtcaagaggaattctacaagtttatcaaacccatattagagaagatggatgggacggaagagttgcttgtaaaactcaatcgcgaagatctactgcgaaagcagcggactttcgacaacggtagcattccacatcaaatccacttaggcgaattgcatgctatacttagaaggcaggaggatttttatccgttcctcaaagacaatcgtgaaaagattgagaaaatcctaacctttcgcataccttactatgtgggacccctggcccgagggaactctcggttcgcatggatgacaagaaagtccgaagaaacgattactccatggaattttgaggaagttgtcgataaaggtgcgtcagctcaatcgttcatcgagaggatgaccaactttgacaagaatttaccgaacgaaaaagtattgcctaagcacagtttactttacgagtatttcacagtgtacaatgaactcacgaaagttaagtatgtcactgagggcatgcgtaaacccgcctttctaagcggagaacagaagaaagcaatagtagatctgttattcaagaccaaccgcaaagtgacagttaagcaattgaaagaggactactttaagaaaattgaatgcttcgattctgtcgagatctccggggtagaagatcgatttaatgcgtcacttggtacgtatcatgacctcctaaagataattaaagataaggacttcctggataacgaagagaatgaagatatcttagaagatatagtgttgactcttaccctctttgaagatcgggaaatgattgaggaaagactaaaaacatacgctcacctgttcgacgataaggttatgaaacagttaaagaggcgtcgctatacgggctggggacgattgtcgcggaaacttatcaacgggataagagacaagcaaagtggtaaaactattctcgattttctaaagagcgacggcttcgccaataggaactttatgcagctgatccatgatgactctttaaccttcaaagaggatatacaaaaggcacaggtttccggacaaggggactcattgcacgaacatattgcgaatcttgctggttcgccagccatcaaaaagggcatactccagacagtcaaagtagtggatgagctagttaaggtcatgggacgtcacaaaccggaaaacattgtaatcgagatggcacgcgaaaatcaaacgactcagaaggggcaaaaaaacagtcgagagcggatgaagagaatagaagagggtattaaagaactgggcagccagatcttaaaggagcatcctgtggaaaatacccaattgcagaacgagaaactttacctctattacctacaaaatggaagggacatgtatgttgatcaggaactggacataaaccgtttatctgattacgacgtcgatgccattgtaccccaatcctttttgaaggacgattcaatcgacaataaagtgcttacacgctcggataagaaccgagggaaaagtgacaatgttccaagcgaggaagtcgtaaagaaaatgaagaactattggcggcagctcctaaatgcgaaactgataacgcaaagaaagttcgataacttaactaaagctgagaggggtggcttgtctgaacttgacaaggccggatttattaaacgtcagctcgtggaaacccgccaaatcacaaagcatgttgcacagatactagattcccgaatgaatacgaaatacgacgagaacgataagctgattcgggaagtcaaagtaatcactttaaagtcaaaattggtgtcggacttcagaaaggattttcaattctataaagttagggagataaataactaccaccatgcgcacgacgcttatcttaatgccgtcgtagggaccgcactcattaagaaatacccgaagctagaaagtgagtttgtgtatggtgattacaaagtttatgacgtccgtaagatgatcgcgaaaagcgaacaggagataggcaaggctacagccaaatacttcttttattctaacattatgaatttctttaagacggaaatcactctggcaaacggagagatacgcaaacgacctttaattgaaaccaatggggagacaggtgaaatcgtatgggataagggccgggacttcgcgacggtgagaaaagttttgtccatgccccaagtcaacatagtaaagaaaactgaggtgcagaccggagggttttcaaaggaatcgattcttccaaaaaggaatagtgataagctcatcgctcgtaaaaaggactgggacccgaaaaagtacggtggcttcgatagccctacagttgcctattctgtcctagtagtggcaaaagttgagaagggaaaatccaagaaactgaagtcagtcaaagaattattggggataacgattatggagcgctcgtcttttgaaaagaaccccatcgacttccttgaggcgaaaggttacaaggaagtaaaaaaggatctcataattaaactaccaaagtatagtctgtttgagttagaaaatggccgaaaacggatgttggctagcgccggagagcttcaaaaggggaacgaactcgcactaccgtctaaatacgtgaatttcctgtatttagcgtcccattacgagaagttgaaaggttcacctgaagataacgaacagaagcaactttttgttgagcagcacaaacattatctcgacgaaatcatagagcaaatttcggaattcagtaagagagtcatcctagctgatgccaatctggacaaagtattaagcgcatacaacaagcacagggataaacccatacgtgagcaggcggaaaatattatccatttgtttactcttaccaacctcggcgctccagccgcattcaagtattttgacacaacgatagatcgcaaacgatacacttctaccaaggaggtgctagacgcgacactgattcaccaatccatcacgggattatatgaaactcggatagatttgtcacagcttgggggtgacggaggtggaggaagcggcggtggaggtagtggaggtggaggatcactcgagtttttggacggtattgacaaagctcaggacgaacatgaaaagtaccactctaactggagagctatggcctccgattttaatcttccgccggtggtagcgaaagaaatcgttgccagttgcgacaaatgccaattgaagggagaagccatgcatggtcaagtggattgttcccccggaatatggcaactcgattgcacgcatctggaaggcaaggtcatcctcgtagcggtacatgttgcttctggatatattgaggccgaggttataccggcagaaacgggccaagaaacagcgtactttctcctgaagcttgcgggacgctggcctgtgaaaacgattcataccgacaacggttctaactttaccggagcaacagtacgggccgcatgctggtgggccggtataaagcaggaatttgggattccatacaatccgcaaagtcaaggtgtcgtcgagtctatgaataaggaactcaaaaagataattggtcaggttagagatcaagccgaacatctcaagacggcggtccaaatggcagtttttattcacaactttaagaggaaaggtgggattggtggctattcagcaggggagcgaatagtggacataatagcaaccgacatacagactaaggagttgcaaaagcagatcacaaagattcaaaattaa

SEQ ID NO: 252 - DNA, 4157 bp, Artificial Sequence
  chemically synthesized
atgcccaaaaagaagaggaaagtcagctcttttttggacggtattgacaaagctcaggacgaacatgaaaagtaccactctaactggagagctatggcctccgattttaatcttccgccggtggtagcgaaagaaatcgttgccagttgcgacaaatgccaattgaagggagaagccatgcatggtcaagtggattgttcccccggaatatggcaactcgattgcacgcatctggaaggcaaggtcatcctcgtagcggtacatgttgcttctggatatattgaggccgaggttataccggcagaaacgggccaagaaacagcgtactttctcctgaagcttgcgggacgctggcctgtgaaaacgattcataccgacaacggttctaactttaccggagcaacagtacgggccgcatgctggtgggccggtataaagcaggaatttgggattccatacaatccgcaaagtcaaggtgtcgtcgagtctatgaataaggaactcaaaaagataattggtcaggttagagatcaagccgaacatctcaagacggcggtccaaatggcagtttttattcacaactttaagaggaaaggtgggattggtggctattcagcaggggagcgaatagtggacataatagcaaccgacatacagactaaggagttgcaaaagcagatcacaaagattcaaaatcttaagggaggcggcgggagtggcggcggtgggagcggcggtggcggctcaggtggcggagggtccggaggcggaggtagcggtggaggcggtagcacgcgtgggataagcggaactacatcctgggcctggccatcggcatcaccagcgtgggctacggcatcatcgactacgagacacgggacgtgatcgatgccggcgtgcggctgttcaaagaggccaacgtggaaaacaacgagggcaggcggagcaagagaggcgccagaaggctgaagcggcggaggcggcatagaatccagagagtgaagaagctgctgttcgactacaacctgctgaccgaccacagcgagctgagcggcatcaacccctacgaggccagagtgaagggcctgagccagaagctgagcgaggaagagttctctgccgccctgctgcacctggccaagagaagaggcgtgcacaacgtgaacgaggtggaagaggacaccggcaacgagctgtccaccaaagagcagatcagccggaacagcaaggccctggaagagaaatacgtggccgaactgcagctggaacggctgaagaaagacggcgaagtgcggggcagcatcaacagattcaagaccagcgactacgtgaaagaagccaaacagctgctgaaggtgcagaaggcctaccaccagctggaccagagcttcatcgacacctacatcgacctgctggaaacccggcggacctactatgagggacctggcgagggcagccccttcggctggaaggacatcaaagaatggtacgagatgctgatgggccactgcacctacttccccgaggaactgcggagcgtgaagtacgcctacaacgccgacctgtacaacgccctgaacgacctgaacaatctcgtgatcaccagggacgagaacgagaagctggaatattacgagaagttccagatcatcgagaacgtgttcaagcagaagaagaagcccaccctgaagcagatcgccaaagaaatcctcgtgaacgaagaggatattaagggctacagagtgaccagcaccggcaagcccgagttcaccaacctgaaggtgtaccacgacatcaaggacattaccgcccggaaagagattattgagaacgccgagctgctggatcagattgccaagatcctgaccatctaccagagcagcgaggacatccaggaagaactgaccaatctgaactccgagctgacccaggaagagatcgagcagatctctaatctgaagggctataccggcacccacaacctgagcctgaaggccatcaacctgatcctggacgagctgtggcacaccaacgacaaccagatcgctatcttcaaccggctgaagctggtgcccaagaaggtggacctgtcccagcagaaagagatccccaccaccctggtggacgacttcatcctgagccccgtcgtgaagagaagcttcatccagagcatcaaagtgatcaacgccatcatcaagaagtacggcctgcccaacgacatcattatcgagctggcccgcgagaagaactccaaggacgcccagaaaatgatcaacgagatgcagaagcggaaccggcagaccaacgagcggatcgaggaaatcatccggaccaccggcaaagagaacgccaagtacctgatcgagaagatcaagctgcacgacatgcaggaaggcaagtgcctgtacagcctggaagccatccctctggaagatctgctgaacaaccccttcaactatgaggtggaccacatcatccccagaagcgtgtccttcgacaacagcttcaacaacaaggtgctcgtgaagcaggaagaagccagcaagaagggcaaccggaccccattccagtacctgagcagcagcgacagcaagatcagctacgaaaccttcaagaagcacatcctgaatctggccaagggcaagggcagaatcagcaagaccaagaaagagtatctgctggaagaacgggacatcaacaggttctccgtgcagaaagacttcatcaaccggaacctggtggataccagatacgccaccagaggcctgatgaacctgctgcggagctacttcagagtgaacaacctggacgtgaaagtgaagtccatcaatggcggcttcaccagctttctgcggcggaagtggaagtttaagaaagagcggaacaaggggtacaagcaccacgccgaggacgccctgatcattgccaacgccgatttcatcttcaaagagtggaagaaactggacaaggccaaaaaagtgatggaaaaccagatgttcgaggaaaagcaggccgagagcatgcccgagatcgaaaccgagcaggagtacaaagagatcttcatcaccccccaccagatcaagcacattaaggacttcaaggactacaagtacagccaccgggtggacaagaagcctaatagagagctgattaacgacaccctgtactccacccggaaggacgacaagggcaacaccctgatcgtgaacaatctgaacggcctgtacgacaaggacaatgacaagctgaaaaagctgatcaacaagagccccgaaaagctgctgatgtaccaccacgacccccagacctaccagaaactgaagctgattatggaacagtacggcgacgagaagaatcccctgtacaagtactacgaggaaaccgggaactacctgaccaagtactccaaaaaggacaacggccccgtgatcaagaagattaagtattacggcaacaaactgaacgcccatctggacatcaccgacgactaccccaacagcagaaacaaggtcgtgaagctgtccctgaagccctacagattcgacgtgtacctggacaatggcgtgtacaagttcgtgaccgtgaagaatctggatgtgatcaaaaaagaaaactactacgaagtgaatagcaagtgctatgaggaagctaagaagctgaagaagatcagcaaccaggccgagtttatcgcctccttctacaacaacgatctgatcaagatcaacggcgagctgtatagagtgatcggcgtgaacaacgacctgctgaaccggatcgaagtgaacatgatcgacatcacctaccgcgagtacctggaaaacatgaacgacaagaggccccccaggatcattaagacaatcgcctccaagacccagagcattaagaagtacagcacagacattctgggcaacctgtatgaagtgaaatctaagaagcaccctcagatcatcaaaaagggcggatccaactcaaagaaaaggtcactggaggacaacgaaacggaaatcaaagtctccagagacacctggaacactaagaacatgcggtccctggaaccgccacgaagcaagaaacggatacatctcgaggactacaaagaccatgacggtgattataaagatcatgacatcgattacaaggatgacgatgacaagtaa

SEQ ID NO: 253 - DNA, 2529 bp, Artificial Sequence
  chemically synthesized
atggactacaaagaccatgacggtgattataaagatcatgacatcgactacaaggatgacgatgacaagggcggaaactcaaagaaaaggtcactggaggacaacgaaacggaaatcaaagtctccagagacacctggaacactaagaacatgcggtccctggaaccgccacgaagcaagaaacggatacatggaggccccgggggaatcgatgccaagaacactattacgaaaacactgaaacttcgaattgtccggccctacaatagtgcagaggtggagaaaatcgttgcagacgagaaaaacaaccgggagaaaatagccttggagaagaataaggataaggtcaaggaggcgtgctccaaacacctcaaagtagcggcgtactgcacgacacaggtggagcgaaacgcttgcctcttttgcaaagcccgcaaacttgacgacaagttctaccaaaagctgcgcggtcagtttcccgatgccgtattctggcaagagatctctgagatctttcgacagttgcagaagcaggcagctgagatatacaatcagtcacttatcgagttgtactacgaaatctttattaagggaaagggcatcgcaaatgcctcctctgtcgagcattatctctcagacgtgtgctatactcgggccgcggaactgttcaaaaacgcggccattgcgagcggtctgcgctctaagattaagagcaattttagattgaaagagctgaagaatatgaagtcaggactccccactaccaaatctgataattttcctatacccttggtaaagcaaaaaggcgggcaatatacaggatttgagattagtaatcataactcagatttcatcataaaaatccctttcggtcgctggcaggtcaagaaagagattgataaatatcggccttgggagaaatttgatttcgagcaagtgcagaaatcacccaaacctatctcattgttgttgtcaacgcagcggcgaaagcggaataagggttggagcaaggacgagggtacggaagctgagataaagaaagtgatgaatggcgattatcagaccagttacatagaagtgaaacggggctccaaaatatgcgagaaatccgcatggatgctcaaccttagcattgatgttcctaagatagacaagggtgtagacccgtctatcattgggggcatagccgtaggcgttaaaagtccactggtgtgcgccataaacaatgctttttctcgatatagtatatctgataatgatcttttccacttcaacaagaagatgtttgcccgacgaagaatacttttgaagaaaaataggcacaaaagggcaggtcatggggcgaagaacaaactgaagccgatcactattttgacggagaaatccgaacgattccgcaagaaactgatcgaacgctgggcatgtgagatagcagattttttcattaagaacaaggtagggaccgtacagatggagaatcttgagtcaatgaagaggaaggaggattcatactttaacatacgcctccgaggtttttggccctatgctgaaatgcaaaacaagatcgagttcaaactgaaacagtacggtatcgagattcgcaaagttgcgcccaataacaccagtaaaacctgctctaaatgtggtcacttgaataattattttaattttgaatacaggaagaaaaataaatttccacacttcaaatgcgagaaatgtaatttcaaggaaaatgcggcctataacgctgccctgaacatttctaatccgaaactcaagtctacgaaggaggagcctggatccgggggcgggggaagcggcggtggaggtagtggagggggaggatcaacgcgtttcttggacggtattgacaaagctcaggacgaacatgaaaagtaccactctaactggagagctatggcctccgattttaatcttccgccggtggtagcgaaagaaatcgttgccagttgcgacaaatgccaattgaagggagaagccatgcatggtcaagtggattgttcccccggaatatggcaactcgattgcacgcatctggaaggcaaggtcatcctcgtagcggtacatgttgcttctggatatattgaggccgaggttataccggcagaaacgggccaagaaacagcgtactttctcctgaaacttgcgggacgctggcctgtgaaaacgattcataccgacaacggttctaactttaccggagcaacagtacgggccgcatgctggtgggccggtataaagcaggaatttgggattccatacaatccgcaaagtcaaggtgtcgtcgagtctatgaataaggaactcaaaaagataattggtcaggttagagatcaagccgaacatctcaagacggcggtccaaatggcagtttttattcacaactttaagaggaaaggtgggattggtggctattcagcaggggagcgaatagtggacataatagcaaccgacatacagactaaggagttgcaaaagcagatcacaaagattcaaaatctcgagtaa

SEQ ID NO: 254 - DNA, 2523 bp, Artificial Sequence
  chemically synthesized
atgacgcgtttcttggacggtattgacaaagctcaggacgaacatgaaaagtaccactctaactggagagctatggcctccgattttaatcttccgccggtggtagcgaaagaaatcgttgccagttgcgacaaatgccaattgaagggagaagccatgcatggtcaagtggattgttcccccggaatatggcaactcgattgcacgcatctggaaggcaaggtcatcctcgtagcggtacatgttgcttctggatatattgaggccgaggttataccggcagaaacgggccaagaaacagcgtactttctcctgaaacttgcgggacgctggcctgtgaaaacgattcataccgacaacggttctaactttaccggagcaacagtacgggccgcatgctggtgggccggtataaagcaggaatttgggattccatacaatccgcaaagtcaaggtgtcgtcgagtctatgaataaggaactcaaaaagataattggtcaggttagagatcaagccgaacatctcaagacggcggtccaaatggcagtttttattcacaactttaagaggaaaggtgggattggtggctattcagcaggggagcgaatagtggacataatagcaaccgacatacagactaaggagttgcaaaagcagatcacaaagattcaaaatctcgaggggggcgggggaagcggcggtggaggtagtggagggggaggatcacccgggggaatcgatgccaagaacactattacgaaaacactgaaacttcgaattgtccggccctacaatagtgcagaggtggagaaaatcgttgcagacgagaaaaacaaccgggagaaaatagccttggagaagaataaggataaggtcaaggaggcgtgctccaaacacctcaaagtagcggcgtactgcacgacacaggtggagcgaaacgcttgcctcttttgcaaagcccgcaaacttgacgacaagttctaccaaaagctgcgcggtcagtttcccgatgccgtattctggcaagagatctctgagatctttcgacagttgcagaagcaggcagctgagatatacaatcagtcacttatcgagttgtactacgaaatctttattaagggaaagggcatcgcaaatgcctcctctgtcgagcattatctctcagacgtgtgctatactcgggccgcggaactgttcaaaaacgcggccattgcgagcggtctgcgctctaagattaagagcaattttagattgaaagagctgaagaatatgaagtcaggactccccactaccaaatctgataattttcctatacccttggtaaagcaaaaaggcgggcaatatacaggatttgagattagtaatcataactcagatttcatcataaaaatccctttcggtcgctggcaggtcaagaaagagattgataaatatcggccttgggagaaatttgatttcgagcaagtgcagaaatcacccaaacctatctcattgttgttgtcaacgcagcggcgaaagcggaataagggttggagcaaggacgagggtacggaagctgagataaagaaagtgatgaatggcgattatcagaccagttacatagaagtgaaacggggctccaaaatatgcgagaaatccgcatggatgctcaaccttagcattgatgttcctaagatagacaagggtgtagacccgtctatcattgggggcatagccgtaggcgttaaaagtccactggtgtgcgccataaacaatgctttttctcgatatagtatatctgataatgatcttttccacttcaacaagaagatgtttgcccgacgaagaatacttttgaagaaaaataggcacaaaagggcaggtcatggggcgaagaacaaactgaagccgatcactattttgacggagaaatccgaacgattccgcaagaaactgatcgaacgctgggcatgtgagatagcagattttttcattaagaacaaggtagggaccgtacagatggagaatcttgagtcaatgaagaggaaggaggattcatactttaacatacgcctccgaggtttttggccctatgctgaaatgcaaaacaagatcgagttcaaactgaaacagtacggtatcgagattcgcaaagttgcgcccaataacaccagtaaaacctgctctaaatgtggtcacttgaataattattttaattttgaatacaggaagaaaaataaatttccacacttcaaatgcgagaaatgtaatttcaaggaaaatgcggcctataacgctgccctgaacatttctaatccgaaactcaagtctacgaaggaggagcctggatccaactcaaagaaaaggtcactggaggacaacgaaacggaaatcaaagtctccagagacacctggaacactaagaacatgcggtccctggaaccgccacgaagcaagaaacggatacatggcggagactacaaagaccatgacggtgattataaagatcatgacatcgactacaaggatgacgatgacaagtaa

SEQ ID NO: 255 - DNA, 4272 bp, Artificial Sequence
  chemically synthesized
atggactataaggaccacgacggagactacaaggatcatgatattgattacaaagacgatgacgataagatggccccaaagaagaagcggaaggtcggtatccacggagtcccagcagccgacaagaagtacagcatcggcctggacatcggcaccaactctgtgggctgggccgtgatcaccgacgagtacaaggtgcccagcaagaaattcaaggtgctgggcaacaccgaccggcacagcatcaagaagaacctgatcggagccctgctgttcgacagcggcgaaacagccgaggccacccggctgaagagaaccgccagaagaagatacaccagacggaagaaccggatctgctatctgcaagagatcttcagcaacgagatggccaaggtggacgacagcttcttccacagactggaagagtccttcctggtggaagaggataagaagcacgagcggcaccccatcttcggcaacatcgtggacgaggtggcctaccacgagaagtaccccaccatctaccacctgagaaagaaactggtggacagcaccgacaaggccgacctgcggctgatctatctggccctggcccacatgatcaagttccggggccacttcctgatcgagggcgacctgaaccccgacaacagcgacgtggacaagctgttcatccagctggtgcagacctacaaccagctgttcgaggaaaaccccatcaacgccagcggcgtggacgccaaggccatcctgtctgccagactgagcaagagcagacggctggaaaatctgatcgcccagctgcccggcgagaagaagaatggcctgttcggaaacctgattgccctgagcctgggcctgacccccaacttcaagagcaacttcgacctggccgaggatgccaaactgcagctgagcaaggacacctacgacgacgacctggacaacctgctggcccagatcggcgaccagtacgccgacctgtttctggccgccaagaacctgtccgacgccatcctgctgagcgacatcctgagagtgaacaccgagatcaccaaggcccccctgagcgcctctatgatcaagagatacgacgagcaccaccaggacctgaccctgctgaaagctctcgtgcggcagcagctgcctgagaagtacaaagagattttcttcgaccagagcaagaacggctacgccggctacattgacggcggagccagccaggaagagttctacaagttcatcaagcccatcctggaaaagatggacggcaccgaggaactgctcgtgaagctgaacagagaggacctgctgcggaagcagcggaccttcgacaacggcagcatcccccaccagatccacctgggagagctgcacgccattctgcggcggcaggaagatttttacccattcctgaaggacaaccgggaaaagatcgagaagatcctgaccttccgcatcccctactacgtgggccctctggccaggggaaacagcagattcgcctggatgaccagaaagagcgaggaaaccatcaccccctggaacttcgaggaagtggtggacaagggcgcttccgcccagagcttcatcgagcggatgaccaacttcgataagaacctgcccaacgagaaggtgctgcccaagcacagcctgctgtacgagtacttcaccgtgtataacgagctgaccaaagtgaaatacgtgaccgagggaatgagaaagcccgccttcctgagcggcgagcagaaaaaggccatcgtggacctgctgttcaagaccaaccggaaagtgaccgtgaagcagctgaaagaggactacttcaagaaaatcgagtgcttcgactccgtggaaatctccggcgtggaagatcggttcaacgcctccctgggcacataccacgatctgctgaaaattatcaaggacaaggacttcctggacaatgaggaaaacgaggacattctggaagatatcgtgctgaccctgacactgtttgaggacagagagatgatcgaggaacggctgaaaacctatgcccacctgttcgacgacaaagtgatgaagcagctgaagcggcggagatacaccggctggggcaggctgagccggaagctgatcaacggcatccgggacaagcagtccggcaagacaatcctggatttcctgaagtccgacggcttcgccaacagaaacttcatgcagctgatccacgacgacagcctgacctttaaagaggacatccagaaagcccaggtgtccggccagggcgatagcctgcacgagcacattgccaatctggccggcagccccgccattaagaagggcatcctgcagacagtgaaggtggtggacgagctcgtgaaagtgatgggccggcacaagcccgagaacatcgtgatcgaaatggccagagagaaccagaccacccagaagggacagaagaacagccgcgagagaatgaagcggatcgaagagggcatcaaagagctgggcagccagatcctgaaagaacaccccgtggaaaacacccagctgcagaacgagaagctgtacctgtactacctgcagaatgggcgggatatgtacgtggaccaggaactggacatcaaccggctgtccgactacgatgtggaccatatcgtgcctcagagctttctgaaggacgactccatcgacaacaaggtgctgaccagaagcgacaagaaccggggcaagagcgacaacgtgccctccgaagaggtcgtgaagaagatgaagaactactggcggcagctgctgaacgccaagctgattacccagagaaagttcgacaatctgaccaaggccgagagaggcggcctgagcgaactggataaggccggcttcatcaagagacagctggtggaaacccggcagatcacaaagcacgtggcacagatcctggactcccggatgaacactaagtacgacgagaatgacaagctgatccgggaagtgaaagtgatcaccctgaagtccaagctggtgtccgatttccggaaggatttccagttttacaaagtgcgcgagatcaacaactaccaccacgcccacgacgcctacctgaacgccgtcgtgggaaccgccctgatcaaaaagtaccctaagctggaaagcgagttcgtgtacggcgactacaaggtgtacgacgtgcggaagatgatcgccaagagcgagcaggaaatcggcaaggctaccgccaagtacttcttctacagcaacatcatgaactttttcaagaccgagattaccctggccaacggcgagatccggaagcggcctctgatcgagacaaacggcgaaaccggggagatcgtgtgggataagggccgggattttgccaccgtgcggaaagtgctgagcatgccccaagtgaatatcgtgaaaaagaccgaggtgcagacaggcggcttcagcaaagagtctatcctgcccaagaggaacagcgataagctgatcgccagaaagaaggactgggaccctaagaagtacggcggcttcgacagccccaccgtggcctattctgtgctggtggtggccaaagtggaaaagggcaagtccaagaaactgaagagtgtgaaagagctgctggggatcaccatcatggaaagaagcagcttcgagaagaatcccatcgactttctggaagccaagggctacaaagaagtgaaaaaggacctgatcatcaagctgcctaagtactccctgttcgagctggaaaacggccggaagagaatgctggcctctgccggcgaactgcagaagggaaacgaactggccctgccctccaaatatgtgaacttcctgtacctggccagccactatgagaagctgaagggctcccccgaggataatgagcagaaacagctgtttgtggaacagcacaagcactacctggacgagatcatcgagcagatcagcgagttctccaagagagtgatcctggccgacgctaatctggacaaagtgctgtccgcctacaacaagcaccgggataagcccatcagagagcaggccgagaatatcatccacctgtttaccctgaccaatctgggagcccctgccgccttcaagtactttgacaccaccatcgaccggaagaggtacaccagcaccaaagaggtgctggacgccaccctgatccaccagagcatcaccggcctgtacgagacacggatcgacctgtctcagctgggaggcgacaaaaggccggcggccacgaaaaaggccggccaggcaaaaaagaaaaagtaa

SEQ ID NO: 256 - DNA, 4347 bp, Artificial Sequence
  chemically synthesized
atggactataaggaccacgacggagactacaaggatcatgatattgattacaaagacgatgacgataagatggccccaaagaagaagcggaaggtcggtatccacggagtcccagcagccgacaagaagtacagcatcggcctggacatcggcaccaactctgtgggctgggccgtgatcaccgacgagtacaaggtgcccagcaagaaattcaaggtgctgggcaacaccgaccggcacagcatcaagaagaacctgatcggagccctgctgttcgacagcggcgaaacagccgaggccacccggctgaagagaaccgccagaagaagatacaccagacggaagaaccggatctgctatctgcaagagatcttcagcaacgagatggccaaggtggacgacagcttcttccacagactggaagagtccttcctggtggaagaggataagaagcacgagcggcaccccatcttcggcaacatcgtggacgaggtggcctaccacgagaagtaccccaccatctaccacctgagaaagaaactggtggacagcaccgacaaggccgacctgcggctgatctatctggccctggcccacatgatcaagttccggggccacttcctgatcgagggcgacctgaaccccgacaacagcgacgtggacaagctgttcatccagctggtgcagacctacaaccagctgttcgaggaaaaccccatcaacgccagcggcgtggacgccaaggccatcctgtctgccagactgagcaagagcagacggctggaaaatctgatcgcccagctgcccggcgagaagaagaatggcctgttcggaaacctgattgccctgagcctgggcctgacccccaacttcaagagcaacttcgacctggccgaggatgccaaactgcagctgagcaaggacacctacgacgacgacctggacaacctgctggcccagatcggcgaccagtacgccgacctgtttctggccgccaagaacctgtccgacgccatcctgctgagcgacatcctgagagtgaacaccgagatcaccaaggcccccctgagcgcctctatgatcaagagatacgacgagcaccaccaggacctgaccctgctgaaagctctcgtgcggcagcagctgcctgagaagtacaaagagattttcttcgaccagagcaagaacggctacgccggctacattgacggcggagccagccaggaagagttctacaagttcatcaagcccatcctggaaaagatggacggcaccgaggaactgctcgtgaagctgaacagagaggacctgctgcggaagcagcggaccttcgacaacggcagcatcccccaccagatccacctgggagagctgcacgccattctgcggcggcaggaagatttttacccattcctgaaggacaaccgggaaaagatcgagaagatcctgaccttccgcatcccctactacgtgggccctctggccaggggaaacagcagattcgcctggatgaccagaaagagcgaggaaaccatcaccccctggaacttcgaggaagtggtggacaagggcgcttccgcccagagcttcatcgagcggatgaccaacttcgataagaacctgcccaacgagaaggtgctgcccaagcacagcctgctgtacgagtacttcaccgtgtataacgagctgaccaaagtgaaatacgtgaccgagggaatgagaaagcccgccttcctgagcggcgagcagaaaaaggccatcgtggacctgctgttcaagaccaaccggaaagtgaccgtgaagcagctgaaagaggactacttcaagaaaatcgagtgcttcgactccgtggaaatctccggcgtggaagatcggttcaacgcctccctgggcacataccacgatctgctgaaaattatcaaggacaaggacttcctggacaatgaggaaaacgaggacattctggaagatatcgtgctgaccctgacactgtttgaggacagagagatgatcgaggaacggctgaaaacctatgcccacctgttcgacgacaaagtgatgaagcagctgaagcggcggagatacaccggctggggcaggctgagccggaagctgatcaacggcatccgggacaagcagtccggcaagacaatcctggatttcctgaagtccgacggcttcgccaacagaaacttcatgcagctgatccacgacgacagcctgacctttaaagaggacatccagaaagcccaggtgtccggccagggcgatagcctgcacgagcacattgccaatctggccggcagccccgccattaagaagggcatcctgcagacagtgaaggtggtggacgagctcgtgaaagtgatgggccggcacaagcccgagaacatcgtgatcgaaatggccagagagaaccagaccacccagaagggacagaagaacagccgcgagagaatgaagcggatcgaagagggcatcaaagagctgggcagccagatcctgaaagaacaccccgtggaaaacacccagctgcagaacgagaagctgtacctgtactacctgcagaatgggcgggatatgtacgtggaccaggaactggacatcaaccggctgtccgactacgatgtggaccatatcgtgcctcagagctttctgaaggacgactccatcgacaacaaggtgctgaccagaagcgacaagaaccggggcaagagcgacaacgtgccctccgaagaggtcgtgaagaagatgaagaactactggcggcagctgctgaacgccaagctgattacccagagaaagttcgacaatctgaccaaggccgagagaggcggcctgagcgaactggataaggccggcttcatcaagagacagctggtggaaacccggcagatcacaaagcacgtggcacagatcctggactcccggatgaacactaagtacgacgagaatgacaagctgatccgggaagtgaaagtgatcaccctgaagtccaagctggtgtccgatttccggaaggatttccagttttacaaagtgcgcgagatcaacaactaccaccacgcccacgacgcctacctgaacgccgtcgtgggaaccgccctgatcaaaaagtaccctaagctggaaagcgagttcgtgtacggcgactacaaggtgtacgacgtgcggaagatgatcgccaagagcgagcaggaaatcggcaaggctaccgccaagtacttcttctacagcaacatcatgaactttttcaagaccgagattaccctggccaacggcgagatccggaagcggcctctgatcgagacaaacggcgaaaccggggagatcgtgtgggataagggccgggattttgccaccgtgcggaaagtgctgagcatgccccaagtgaatatcgtgaaaaagaccgaggtgcagacaggcggcttcagcaaagagtctatcctgcccaagaggaacagcgataagctgatcgccagaaagaaggactgggaccctaagaagtacggcggcttcgacagccccaccgtggcctattctgtgctggtggtggccaaagtggaaaagggcaagtccaagaaactgaagagtgtgaaagagctgctggggatcaccatcatggaaagaagcagcttcgagaagaatcccatcgactttctggaagccaagggctacaaagaagtgaaaaaggacctgatcatcaagctgcctaagtactccctgttcgagctggaaaacggccggaagagaatgctggcctctgccggcgaactgcagaagggaaacgaactggccctgccctccaaatatgtgaacttcctgtacctggccagccactatgagaagctgaagggctcccccgaggataatgagcagaaacagctgtttgtggaacagcacaagcactacctggacgagatcatcgagcagatcagcgagttctccaagagagtgatcctggccgacgctaatctggacaaagtgctgtccgcctacaacaagcaccgggataagcccatcagagagcaggccgagaatatcatccacctgtttaccctgaccaatctgggagcccctgccgccttcaagtactttgacaccaccatcgaccggaagaggtacaccagcaccaaagaggtgctggacgccaccctgatccaccagagcatcaccggcctgtacgagacacggatcgacctgtctcagctgggaggcgacggatccaactcaaagaaaaggtcactggaggacaacgaaacggaaatcaaagtctccagagacacctggaacactaagaacatgcggtccctggaaccgccacgaagcaagaaacggatacattag

SEQ ID NO: 257 - DNA, 1785 bp, Artificial Sequence
  chemically synthesized
atggactacaaagaccatgacggtgattataaagatcatgacatcgactacaaggatgacgatgacaagggcggaaactcaaagaaaaggtcactggaggacaacgaaacggaaatcaaagtctccagagacacctggaacactaagaacatgcggtccctggaaccgccacgaagcaagaaacggatacatggaggcgccaagaacactattacgaaaacactgaaacttcgaattgtccggccctacaatagtgcagaggtggagaaaatcgttgcagacgagaaaaacaaccgggagaaaatagccttggagaagaataaggataaggtcaaggaggcgtgctccaaacacctcaaagtagcggcgtactgcacgacacaggtggagcgaaacgcttgcctcttttgcaaagcccgcaaacttgacgacaagttctaccaaaagctgcgcggtcagtttcccgatgccgtattctggcaagagatctctgagatctttcgacagttgcagaagcaggcagctgagatatacaatcagtcacttatcgagttgtactacgaaatctttattaagggaaagggcatcgcaaatgcctcctctgtcgagcattatctctcagacgtgtgctatactcgggccgcggaactgttcaaaaacgcggccattgcgagcggtctgcgctctaagattaagagcaattttagattgaaagagctgaagaatatgaagtcaggactccccactaccaaatctgataattttcctatacccttggtaaagcaaaaaggcgggcaatatacaggatttgagattagtaatcataactcagatttcatcataaaaatccctttcggtcgctggcaggtcaagaaagagattgataaatatcggccttgggagaaatttgatttcgagcaagtgcagaaatcacccaaacctatctcattgttgttgtcaacgcagcggcgaaagcggaataagggttggagcaaggacgagggtacggaagctgagataaagaaagtgatgaatggcgattatcagaccagttacatagaagtgaaacggggctccaaaatatgcgagaaatccgcatggatgctcaaccttagcattgatgttcctaagatagacaagggtgtagacccgtctatcattgggggcatagacgtaggcgttaaaagtccactggtgtgcgccataaacaatgctttttctcgatatagtatatctgataatgatcttttccacttcaacaagaagatgtttgcccgacgaagaatacttttgaagaaaaataggcacaaaagggcaggtcatggggcgaagaacaaactgaagccgatcactattttgacggagaaatccgaacgattccgcaagaaactgatcgaacgctgggcatgtgagatagcagattttttcattaagaacaaggtagggaccgtacagatggagaatcttgagtcaatgaagaggaaggaggattcatactttaacatacgcctccgaggtttttggccctatgctgaaatgcaaaacaagatcgagttcaaactgaaacagtacggtatcgagattcgcaaagttgcgcccaataacaccagtaaaacctgctctaaatgtggtcacttgaataattattttaattttgaatacaggaagaaaaataaatttccacacttcaaatgcgagaaatgtaatttcaaggaaaatgcggactataacgctgccctgaacatttctaatccgaaactcaagtctacgaaggaggagccttag

SEQ ID NO: 258 - DNA, 30 bp, Artificial Sequence
  chemically synthesized
actggaagggctaattcactcccaaagaag

SEQ ID NO: 259 - DNA, 30 bp, Artificial Sequence
  chemically synthesized
ttttagtcagtgtggaaaatctctagcagt

SEQ ID NO: 260 - DNA, 18 bp, Artificial Sequence
  chemically synthesized
aatgtagtcttatgcaat

SEQ ID NO: 261 - DNA, 18 bp, Artificial Sequence
  chemically synthesized
gaagcagaaggcttcatt

SEQ ID NO: 262 - DNA, 30 bp, Artificial Sequence
  chemically synthesized
tgtggtggaatgccactagaaactagggaa

SEQ ID NO: 263 - DNA, 30 bp, Artificial Sequence
  chemically synthesized
gataatcaatatacaaaattccatgacaat

SEQ ID NO: 264 - DNA, 30 bp, Artificial Sequence
  chemically synthesized
actgtggggtttttatgaggggttttataa

SEQ ID NO: 265 - DNA, 30 bp, Artificial Sequence
  chemically synthesized
ctctagtttgtctgttcgagatcctacagt

SEQ ID NO: 266 - DNA, 15 bp, Artificial Sequence
  chemically synthesized
aatgaaagaccccac

SEQ ID NO: 267 - DNA, 15 bp, Artificial Sequence
  chemically synthesized
cgggggtctttcatt

SEQ ID NO: 268 - DNA, 30 bp, Artificial Sequence
  chemically synthesized
aatgccgcgcctgcagcagaaatggttgaa

SEQ ID NO: 269 - DNA, 30 bp, Artificial Sequence
  chemically synthesized
gtgaccctcaggtcggccgactgcggcagc

SEQ ID NO: 270 - DNA, 30 bp, Artificial Sequence
  chemically synthesized
aatgagaaactaatttttgttattttatta

SEQ ID NO: 271 - DNA, 30 bp, Artificial Sequence
  chemically synthesized
aatttagataagtgaatttgaattaacatt

SEQ ID NO: 272 - DNA, 30 bp, Artificial Sequence
  chemically synthesized
tttgtatgaaagatcatgccgacctaggcg

SEQ ID NO: 273 - DNA, 30 bp, Artificial Sequence
  chemically synthesized
tctagcggccaggagagaccggcaaacaat

SEQ ID NO: 274 - DNA, 30 bp, Artificial Sequence
  chemically synthesized
actggaagggatttattacagtgcaagaag

SEQ ID NO: 275 - DNA, 30 bp, Artificial Sequence
  chemically synthesized
ggaaaccgaagcaggaaaatccctagcaga

SEQ ID NO: 276 - DNA, 30 bp, Artificial Sequence
  chemically synthesized
actgggatgagtattggaaccctgaagaaa

SEQ ID NO: 277 - DNA, 30 bp, Artificial Sequence
  chemically synthesized
tctcggaatccgggccgagaacttcgcagt

SEQ ID NO: 278 - DNA, 26 bp, Artificial Sequence
  chemically synthesized
actgtggggcagggtgggacctcagg

SEQ ID NO: 279 - DNA, 26 bp, Artificial Sequence
  chemically synthesized
cggggcggtgaagaacacccaacagt

SEQ ID NO: 280 - DNA, 30 bp, Artificial Sequence
  chemically synthesized
tgttggaatagaaatcaactatcatctact

SEQ ID NO: 281 - DNA, 30 bp, Artificial Sequence; identical to SEQ ID NO: 280
  chemically synthesized

SEQ ID NO: 282 - DNA, 50 bp, Artificial Sequence
  chemically synthesized
tgatcttacccagcaatagtggacacgcggctaagtgagtaaactctcag

SEQ ID NO: 283 - DNA, 50 bp, Artificial Sequence
  chemically synthesized
aaaacaagaacctcgcttaggcctgtgtccatattacgtgggtaggatca

SEQ ID NO: 284 - DNA, 164 bp, Artificial Sequence
  chemically synthesized
gaattcagacccgcaagtactggaagggctaattcactcccaaagaagaaggatccaaatcgataagagctcaacaattgaaaggcctaactcgagaatctagaaagcggccgcaattttagtcagtgtggaaaatctctagcagtactagcgggtcagaattc

SEQ ID NO: 285 - DNA, 140 bp, Artificial Sequence
  chemically synthesized
gaattcagacccgcaagtaatgtagtcttatgcaataaggatccaaatcgataagagctcaacaattgaaaggcctaactcgagaatctagaaagcggccgcaagaagcagaaggcttcattactagcgggtcagaattc

SEQ ID NO: 286 - DNA, 134 bp, Artificial Sequence
  chemically synthesized
gaattcagacccgcaagtaatgaaagaccccacaaggatccaaatcgataagagctcaacaattgaaaggcctaactcgagaatctagaaagcggccgcaacgggggtctttcattactagcgggtcagaattc

SEQ ID NO: 287 - DNA, 164 bp, Artificial Sequence
  chemically synthesized
gaattcagacccgcaagtaatgccgcgcctgcagcagaaatggttgaaaaggatccaaatcgataagagctcaacaattgaaaggcctaactcgagaatctagaaagcggccgcaagtgaccctcaggtcggccgactgcggcagcactagcgggtcagaattc

SEQ ID NO: 288 - DNA, 164 bp, Artificial Sequence
  chemically synthesized
gaattcagacccgcaagttttgtatgaaagatcatgccgacctaggcgaaggatccaaatcgataagagctcaacaattgaaaggcctaactcgagaatctagaaagcggccgcaatctagcggccaggagagaccggcaaacaatactagcgggtcagaattc

SEQ ID NO: 289 - DNA, 164 bp, Artificial Sequence
  chemically synthesized
gaattcagacccgcaagtaatgagaaactaatttttgttattttattaaaggatccaaatcgataagagctcaacaattgaaaggcctaactcgagaatctagaaagcggccgcaaaatttagataagtgaatttgaattaacattactagcgggtcagaattc

SEQ ID NO: 290 - DNA, 164 bp, Artificial Sequence
  chemically synthesized
gaattcagacccgcaagtactgtggggtttttatgaggggttttataaaaggatccaaatcgataagagctcaacaattgaaaggcctaactcgagaatctagaaagcggccgcaactctagtttgtctgttcgagatcctacagtactagcgggtcagaattc

SEQ ID NO: 291 - DNA, 164 bp, Artificial Sequence
  chemically synthesized
gaattcagacccgcaagtactggaagggatttattacagtgcaagaagaaggatccaaatcgataagagctcaacaattgaaaggcctaactcgagaatctagaaagcggccgcaaggaaaccgaagcaggaaaatccctagcagaactagcgggtcagaattc

SEQ ID NO: 292 - DNA, 164 bp, Artificial Sequence
  chemically synthesized
gaattcagacccgcaagtactgggatgagtattggaaccctgaagaaaaaggatccaaatcgataagagctcaacaattgaaaggcctaactcgagaatctagaaagcggccgcaatctcggaatccgggccgagaacttcgcagtactagcgggtcagaattc

SEQ ID NO: 293 - DNA, 156 bp, Artificial Sequence
  chemically synthesized
gaattcagacccgcaagtactgtggggcagggtgggacctcaggaaggatccaaatcgataagagctcaacaattgaaaggcctaactcgagaatctagaaagcggccgcaacggggcggtgaagaacacccaacagtactagcgggtcagaattc

SEQ ID NO: 294 - DNA, 164 bp, Artificial Sequence
  chemically synthesized
gaattcagacccgcaagttgtggtggaatgccactagaaactagggaaaaggatccaaatcgataagagctcaacaattgaaaggcctaactcgagaatctagaaagcggccgcaagataatcaatatacaaaattccatgacaatactagcgggtcagaattc

SEQ ID NO: 295 - DNA, 136 bp, Artificial Sequence
  chemically synthesized
catatgttggaatagaaatcaactatcatctactaaggatccaaatcgataagagctcaacaattgaaaggcctaactcgagaatctagaaagcggccgcaaacaattatctcaacattcacccatttctcatatg

SEQ ID NO: 296 - DNA, 200 bp, Artificial Sequence
  chemically synthesized
gaattcagagctcttcactatgatcttacccagcaatagtggacacgcggctaagtgagtaaactctcagaaggatccaaatcgataagagctcaacaattgaactcgagaatctagaaagcggccgcaaaaaacaagaacctcgcttaggcctgtgtccatattacgtgggtaggatcactaagaagagctcagaattc

SEQ ID NO: 297 - DNA, 996 bp, Artificial Sequence
  chemically synthesized
gaattcagacccgcaagtactggaagggctaattcactcccaaagaagaaggatccaagctgactatgtgatcttattaaaattaggttaaatttcgaggttaaaaatagttttaatattgctatagtcttagaggtcttgtatatttatacttaccacacaagatggaccggagcagccctccaatatctagtgtaccctcgtgctcgctcaaacattaagtggtgttgtgcgaaaagaatctcacttcaagaaaaagaatttaccatggagaaaaagattactggatacacaaccgtagacatctctcagtggcaccgtaaggaacactttgaagcgtttcagtccgtcgctcagtgcacctacaatcagaccgtgcaattggacatcaccgcgtttttaaaaaccgtgaagaagaacaaacacaaattttaccctgcttttattcacattttggctcgtcttatgaatgctcatcccgaatttcgcatggcaatgaaagacggtgagttggtaatttgggacagcgttcacccgtgttatacggtttttcacgaacagaccgagaccttttcatctttgtggtcggagtaccacgatgattttcgccagtttttacatatctattctcaagatgtcgcgtgttacggagaaaatctggcgtattttccgaaaggttttatcgaaaatatgtttttcgtctctgcgaacccctgggtgtcgtttacctcttttgatcttaatgtggcaaatatggataacttttttgcgccggtattcacgatgggaaagtattatacgcagggagataaggtactgatgccgcttgctattcaagtgcaccatgcagtatgtgacggctttcatgtcggccgcatgttaaatgagttgcaacagtattgtgacgagtggcaagggggagcttaataatctagaaagcggccgcaattttagtcagtgtggaaaatctctagcagtactagcgggtcagaattc

SEQ ID NO: 298 - DNA, 1953 bp, Artificial Sequence
  chemically synthesized
gaattcagacccgcaagtactggaagggctaattcactcccaaagaagaaggatccaagctgactatgtgatcttattaaaattaggttaaatttcgaggttaaaaatagttttaatattgctatagtcttagaggtcttgtatatttatacttaccacacaagatggaccggagcagccctccaatatctagtgtaccctcgtgctcgctcaaacattaagtggtgttgtgcgaaaagaatctcacttcaagaaaaagaatttaccatggtgagcaagggcgaggaggataacatggccatcatcaaggagttcatgcgcttcaaggtgcacatggagggctccgtgaacggccacgagttcgagatcgagggcgagggcgagggccgcccctacgagggcacccagaccgccaagctgaaggtgaccaagggtggccccctgcccttcgcctgggacatcctgtcccctcagttcatgtacggctccaaggcctacgtgaagcaccctgccgacatccccgactacttgaagctgtccttccccgagggcttcaagtgggagcgcgtgatgaacttcgaggacggcggcgtggtgaccgtgacccaggactcctccctgcaggacggcgagttcatctacaaggtgaagctgcgcggcaccaacttcccctccgacggccccgtaatgcagaagaagaccatgggctgggaggcctcctccgagcggatgtaccccgaggacggcgccctgaagggcgagatcaagcagaggctgaagctgaaggacggcggccactacgacgctgaggtcaagaccacctacaaggccaagaagcccgtgcagctgcccggcgcctacaacgtcaacatcaagttggacatcacctcccacaacgaggactacaccatcgtggaacagtacgaacgcgccgagggccgccactccaccggcggcatggacgagctgtacaagggcagcggcgccaccaacttcagcctgctgaagcaggccggcgacgtggaggagaaccctggacctacagaatataagcccaccgttcgactggcgactcgggatgatgtaccaagagcggtacggactttggcagctgcattcgctgattaccctgccaccagacacacagtcgaccccgatcgacatatagagcgagtgacggaactgcaagagctttttctcaccagggttggcctggatataggtaaagtatgggttgcagacgatggagcagccgtagccgtatggacgacaccagagtcagtcgaggccggggccgtctttgccgaaataggccctagaatggcggaacttagcggctctcggctggcggcccagcagcaaatggaggggctcctcgcgcctcatcgcccaaaggaacctgcgtggtttttggctacggtaggggtgtccccggaccatcagggcaagggactggggagcgcagtggtgctgcctggtgtcgaagcggccgagcgagccggtgtccctgccttcttggagaccagcgctccgcgcaaccttccgttctatgagcgcttgggttttacggtcacggccgatgtcgaatgtcccaaggacagagcaacttggtgtatgacaaggaaaccaggtgctcgggaccctccagacctcgataactaataatctagaactatagtgagtcgtattacgtagatccagacatgataagatacattgatgagtttggacaaaccacaactagaatgcagtgaaaaaaatgctttatttgtgaaatttgtgatgctattgctttatttgtaaccattataagctgcaataaacaagttaacaacaacaattgcattcattttatgtttcaggttcagggggaggtgtgggaggttttttaattcgcggccgcaattttagtcagtgtggaaaatctctagcagtactagcgggtcagaattc

SEQ ID NO: 299 - DNA, 62 bp, Artificial Sequence
  chemically synthesized
ccaaatatccggaagatattccggattatgtgaaacagagctttccggaaggctatacctgg

SEQ ID NO: 300 - DNA, 807 bp, Artificial Sequence
  chemically synthesized
atgaccatgattacgccaagctatttaggtgacactatagaatactcaagctatgcatcaagcttggtaccgagctcggatccgaccgggagacggcggacccaggtcggcggtggcagcggtggcggtgggcggccgctcagcgtgattgcgaaacagatgacctataaagtgtatatgagcggcaccgtgaacggccattattttgaagtggaaggcgatggcaaaggcaaaccgtatgaaggcgaacagaccgtgaaactgaccgtgaccaaaggcggcccgctgccgtttgcgtgggatattctgagcccgcagtgccagtatggcagcattccgtttaccaaatatccggaagatattccggattatgtgaaacagagctttccggaaggctatacctgggaacgcattatgaactttgaagatggcgcggtgtgcaccgtgagcaacgatagcagcattcagggcaactgctttatttatcatgtgaaatttagcggcctgaactttccgccgaacggcccggtgatgcagaaaaaaacccagggctgggaaccgaacaccgaacgcctgtttgcgcgcgatggcatgctgctgggcaacaactttatggcgctgaaactggaaggcggcggccattatctgtgcgaatttaaaaccacctataaagcgaaaaaaccggtgaaaatgccgggctatcattatgtggatcgcaaactggatgtgaccaaccataacaaagattataccagcgtggaacagtgcgaaattagcattgcgcgcaaaccggtggtggcgtaataa

SEQ ID NO: 301 - DNA, 60 bp, Artificial Sequence
  chemically synthesized
ccctggtgaaccgcatcgagctgaagggcatcgacttcaaggaggacggcaacatcctgg

SEQ ID NO: 302 - DNA, 747 bp, Artificial Sequence
  chemically synthesized
atggtgagcaagggcgaggagctgttcaccggggtggtgcccatcctggtcgagctggacggcgacgtaaacggccacaagttcagcgtgtccggcgagggcgagggcgatgccacctacggcaagctgaccctgaagttcatctgcaccaccggcaagctgcccgtgccctggcccaccctcgtgaccaccctgacctacggcgtgcagtgcttcagccgctaccccgaccacatgaagcagcacgacttcttcaagtccgccatgcccgaaggctacgtccaggagcgcaccatcttcttcaaggacgacggcaactacaagacccgcgccgaggtgaagttcgagggcgacaccctggtgaaccgcatcgagctgaagggcatcgacttcaaggaggacggcaacatcctggggcacaagctggagtacaactacaacagccacaacgtctatatcatggccgacaagcagaagaacggcatcaaggtgaacttcaagatccgccacaacatcgaggacggcagcgtgcagctcgccgaccactaccagcagaacacccccatcggcgacggccccgtgctgctgcccgacaaccactacctgagcacccagtccgccctgagcaaagaccccaacgagaagcgcgatcacatggtcctgctggagttcgtgaccgccgccgggatcactctcggcatggacgagctgtacaagaggcctctcgagcctctagaactatagtga

SEQ ID NO: 303 - DNA, 62 bp, Artificial Sequence
  chemically synthesized
cctgcagagtctaataccttttatgctttgataattagcagtttgtctacttggtcactagg

SEQ ID NO: 304 - DNA, 20 bp, Artificial Sequence
  chemically synthesized
cggaatatcttccggatatt

SEQ ID NO: 305 - DNA, 20 bp, Artificial Sequence
  chemically synthesized
gctttccggaaggctatacc

SEQ ID NO: 306 - DNA, 20 bp, Artificial Sequence
  chemically synthesized
cagctcgatgcggttcacca

SEQ ID NO: 307 - DNA, 20 bp, Artificial Sequence
  chemically synthesized
caaggaggacggcaacatcc

SEQ ID NO: 308 - DNA, 20 bp, Artificial Sequence
  chemically synthesized
taaaaggtattagactctgc

SEQ ID NO: 309 - DNA, 20 bp, Artificial Sequence
  chemically synthesized
agtttgtctacttggtcact

SEQ ID NO: 310 - DNA, 5328 bp, Artificial Sequence
  chemically synthesized
atggaacaggctccagaagaccagggtcctcaaagggagccccacaacgaatggactttggagcttctggaggaactgaagaacgaagcagttagacattttccccgcatttggttgcatggattgggccaacacatatatgagacctacggggacacttgggccggtgttgaagcaattatacgcatcctccaacaactcttgttcatacattttaggataggctgccgacatagtcgaatcggtgtcacgcaacaacggcgggcacggaacggggcatcccgatcattggtttctgccggaatcagaaaggtgctttttttggacggtattgacaaagctcaggacgaacatgaaaagtaccactctaactggagagctatggcctccgattttaatcttccgccggtggtagcgaaagaaatcgttgccagttgcgacaaatgccaattgaagggagaagccatgcatggtcaagtggattgttcccccggaatatggcaactcgattgcacgcatctggaaggcaaggtcatcctcgtagcggtacatgttgcttctggatatattgaggccgaggttataccggcagaaacgggccaagaaacagcgtactttctcctgaagcttgcgggacgctggcctgtgaaaacgattcataccgacaacggttctaactttaccggagcaacagtacgggccgcatgctggtgggccggtataaagcaggaatttgggattccatacaatccgcaaagtcaaggtgtcgtcgagtctatgaataaggaactcaaaaagataattggtcaggttagagatcaagccgaacatctcaagacggcggtccaaatggcagtttttattcacaactttaagaggaaaggtgggattggtggctattcagcaggggagcgaatagtggacataatagcaaccgacatacagactaaggagttgcaaaagcagatcacaaagattcaaaatgggggcgggggaagcggcggtggaggtagtggagggggaggatcagataaaaagtattctattggtttagccatcggcactaattccgttggatgggctgtcataaccgatgaatacaaagtaccttcaaagaaatttaaggtgttggggaacacagaccgtcattcgattaaaaagaatcttatcggtgccctcctattcgatagtggcgaaacggcagaggcgactcgcctgaaacgaaccgctcggagaaggtatacacgtcgcaagaaccgaatatgttacttacaagaaatttttagcaatgagatggccaaagttgacgattctttctttcaccgtttggaagagtccttccttgtcgaagaggacaagaaacatgaacggcaccccatctttggaaacatagtagatgaggtggcatatcatgaaaagtacccaacgatttatcacctcagaaaaaagctagttgactcaactgataaagcggacctgaggttaatctacttggctcttgcccatatgataaagttccgtgggcactttctcattgagggtgatctaaatccggacaactcggatgtcgacaaactgttcatccagttagtacaaacctataatcagttgtttgaagagaaccctataaatgcaagtggcgtggatgcgaaggctattcttagcgcccgcctctctaaatcccgacggctagaaaacctgatcgcacaattacccggagagaagaaaaatgggttgttcggtaaccttatagcgctctcactaggcctgacaccaaattttaagtcgaacttcgacttagctgaagatgccaaattgcagcttagtaaggacacgtacgatgacgatctcgacaatctactggcacaaattggagatcagtatgcggacttatttttggctgccaaaaaccttagcgatgcaatcctcctatctgacatactgagagttaatactgagattaccaaggcgccgttatccgcttcaatgatcaaaaggtacgatgaacatcaccaagacttgacacttctcaaggccctagtccgtcagcaactgcctgagaaatataaggaaatattctttgatcagtcgaaaaacgggtacgcaggttatattgacggcggagcgagtcaagaggaattctacaagtttatcaaacccatattagagaagatggatgggacggaagagttgcttgtaaaactcaatcgcgaagatctactgcgaaagcagcggactttcgacaacggtagcattccacatcaaatccacttaggcgaattgcatgctatacttagaaggcaggaggatttttatccgttcctcaaagacaatcgtgaaaagattgagaaaatcctaacctttcgcataccttactatgtgggacccctggcccgagggaactctcggttcgcatggatgacaagaaagtccgaagaaacgattactccatggaattttgaggaagttgtcgataaaggtgcgtcagctcaatcgttcatcgagaggatgaccaactttgacaagaatttaccgaacgaaaaagtattgcctaagcacagtttactttacgagtatttcacagtgtacaatgaactcacgaaagttaagtatgtcactgagggcatgcgtaaacccgcctttctaagcggagaacagaagaaagcaatagtagatctgttattcaagaccaaccgcaaagtgacagttaagcaattgaaagaggactactttaagaaaattgaatgcttcgattctgtcgagatctccggggtagaagatcgatttaatgcgtcacttggtacgtatcatgacctcctaaagataattaaagataaggacttcctggataacgaagagaatgaagatatcttagaagatatagtgttgactcttaccctctttgaagatcgggaaatgattgaggaaagactaaaaacatacgctcacctgttcgacgataaggttatgaaacagttaaagaggcgtcgctatacgggctggggacgattgtcgcggaaacttatcaacgggataagagacaagcaaagtggtaaaactattctcgattttctaaagagcgacggcttcgccaataggaactttatgcagctgatccatgatgactctttaaccttcaaagaggatatacaaaaggcacaggtttccggacaaggggactcattgcacgaacatattgcgaatcttgctggttcgccagccatcaaaaagggcatactccagacagtcaaagtagtggatgagctagttaaggtcatgggacgtcacaaaccggaaaacattgtaatcgagatggcacgcgaaaatcaaacgactcagaaggggcaaaaaaacagtcgagagcggatgaagagaatagaagagggtattaaagaactgggcagccagatcttaaaggagcatcctgtggaaaatacccaattgcagaacgagaaactttacctctattacctacaaaatggaagggacatgtatgttgatcaggaactggacataaaccgtttatctgattacgacgtcgatgccattgtaccccaatcctttttgaaggacgattcaatcgacaataaagtgcttacacgctcggataagaaccgagggaaaagtgacaatgttccaagcgaggaagtcgtaaagaaaatgaagaactattggcggcagctcctaaatgcgaaactgataacgcaaagaaagttcgataacttaactaaagctgagaggggtggcttgtctgaacttgacaaggccggatttattaaacgtcagctcgtggaaacccgccaaatcacaaagcatgttgcacagatactagattcccgaatgaatacgaaatacgacgagaacgataagctgattcgggaagtcaaagtaatcactttaaagtcaaaattggtgtcggacttcagaaaggattttcaattctataaagttagggagataaataactaccaccatgcgcacgacgcttatcttaatgccgtcgtagggaccgcactcattaagaaatacccgaagctagaaagtgagtttgtgtatggtgattacaaagtttatgacgtccgtaagatgatcgcgaaaagcgaacaggagataggcaaggctacagccaaatacttcttttattctaacattatgaatttctttaagacggaaatcactctggcaaacggagagatacgcaaacgacctttaattgaaaccaatggggagacaggtgaaatcgtatgggataagggccgggacttcgcgacggtgagaaaagttttgtccatgccccaagtcaacatagtaaagaaaactgaggtgcagaccggagggttttcaaaggaatcgattcttccaaaaaggaatagtgataagctcatcgctcgtaaaaaggactgggacccgaaaaagtacggtggcttcgatagccctacagttgcctattctgtcctagtagtggcaaaagttgagaagggaaaatccaagaaactgaagtcagtcaaagaattattggggataacgattatggagcgctcgtcttttgaaaagaaccccatcgacttccttgaggcgaaaggttacaaggaagtaaaaaaggatctcataattaaactaccaaagtatagtctgtttgagttagaaaatggccgaaaacggatgttggctagcgccggagagcttcaaaaggggaacgaactcgcactaccgtctaaatacgtgaatttcctgtatttagcgtcccattacgagaagttgaaaggttcacctgaagataacgaacagaagcaactttttgttgagcagcacaaacattatctcgacgaaatcatagagcaaatttcggaattcagtaagagagtcatcctagctgatgccaatctggacaaagtattaagcgcatacaacaagcacagggataaacccatacgtgagcaggcggaaaatattatccatttgtttactcttaccaacctcggcgctccagccgcattcaagtattttgacacaacgatagatcgcaaacgatacacttctaccaaggaggtgctagacgcgacactgattcaccaatccatcacgggattatatgaaactcggatagatttgtcacagcttgggggtgacggatccaactcaaagaaaaggtcactggaggacaacgaaacggaaatcaaagtctccagagacacctggaacactaagaacatgcggtccctggaaccgccacgaagcaagaaacggatacatctcgaggactacaaagaccatgacggtgattataaagatcatgacatcgattacaaggatgacgatgacaagtaa

SEQ ID NO: 311 - DNA, 5388 bp, Artificial Sequence
  chemically synthesized
atgcccaaaaagaagaggaaagtcagctcttttttggacggtattgacaaagctcaggacgaacatgaaaagtaccactctaactggagagctatggcctccgattttaatcttccgccggtggtagcgaaagaaatcgttgccagttgcgacaaatgccaattgaagggagaagccatgcatggtcaagtggattgttcccccggaatatggcaactcgattgcacgcatctggaaggcaaggtcatcctcgtagcggtacatgttgcttctggatatattgaggccgaggttataccggcagaaacgggccaagaaacagcgtactttctcctgaagcttgcgggacgctggcctgtgaaaacgattcataccgacaacggttctaactttaccggagcaacagtacgggccgcatgctggtgggccggtataaagcaggaatttgggattccatacaatccgcaaagtcaaggtgtcgtcgagtctatgaataaggaactcaaaaagataattggtcaggttagagatcaagccgaacatctcaagacggcggtccaaatggcagtttttattcacaactttaagaggaaaggtgggattggtggctattcagcaggggagcgaatagtggacataatagcaaccgacatacagactaaggagttgcaaaagcagatcacaaagattcaaaatgggggcgggggaagcggcggtggaggtagtggagggggaggatcagataaaaagtattctattggtttagccatcggcactaattccgttggatgggctgtcataaccgatgaatacaaagtaccttcaaagaaatttaaggtgttggggaacacagaccgtcattcgattaaaaagaatcttatcggtgccctcctattcgatagtggcgaaacggcagaggcgactcgcctgaaacgaaccgctcggagaaggtatacacgtcgcaagaaccgaatatgttacttacaagaaatttttagcaatgagatggccaaagttgacgattctttctttcaccgtttggaagagtccttccttgtcgaagaggacaagaaacatgaacggcaccccatctttggaaacatagtagatgaggtggcatatcatgaaaagtacccaacgatttatcacctcagaaaaaagctagttgactcaactgataaagcggacctgaggttaatctacttggctcttgcccatatgataaagttccgtgggcactttctcattgagggtgatctaaatccggacaactcggatgtcgacaaactgttcatccagttagtacaaacctataatcagttgtttgaagagaaccctataaatgcaagtggcgtggatgcgaaggctattcttagcgcccgcctctctaaatcccgacggctagaaaacctgatcgcacaattacccggagagaagaaaaatgggttgttcggtaaccttatagcgctctcactaggcctgacaccaaattttaagtcgaacttcgacttagctgaagatgccaaattgcagcttagtaaggacacgtacgatgacgatctcgacaatctactggcacaaattggagatcagtatgcggacttatttttggctgccaaaaaccttagcgatgcaatcctcctatctgacatactgagagttaatactgagattaccaaggcgccgttatccgcttcaatgatcaaaaggtacgatgaacatcaccaagacttgacacttctcaaggccctagtccgtcagcaactgcctgagaaatataaggaaatattctttgatcagtcgaaaaacgggtacgcaggttatattgacggcggagcgagtcaagaggaattctacaagtttatcaaacccatattagagaagatggatgggacggaagagttgcttgtaaaactcaatcgcgaagatctactgcgaaagcagcggactttcgacaacggtagcattccacatcaaatccacttaggcgaattgcatgctatacttagaaggcaggaggatttttatccgttcctcaaagacaatcgtgaaaagattgagaaaatcctaacctttcgcataccttactatgtgggacccctggcccgagggaactctcggttcgcatggatgacaagaaagtccgaagaaacgattactccatggaattttgaggaagttgtcgataaaggtgcgtcagctcaatcgttcatcgagaggatgaccaactttgacaagaatttaccgaacgaaaaagtattgcctaagcacagtttactttacgagtatttcacagtgtacaatgaactcacgaaagttaagtatgtcactgagggcatgcgtaaacccgcctttctaagcggagaacagaagaaagcaatagtagatctgttattcaagaccaaccgcaaagtgacagttaagcaattgaaagaggactactttaagaaaattgaatgcttcgattctgtcgagatctccggggtagaagatcgatttaatgcgtcacttggtacgtatcatgacctcctaaagataattaaagataaggacttcctggataacgaagagaatgaagatatcttagaagatatagtgttgactcttaccctctttgaagatcgggaaatgattgaggaaagactaaaaacatacgctcacctgttcgacgataaggttatgaaacagttaaagaggcgtcgctatacgggctggggacgattgtcgcggaaacttatcaacgggataagagacaagcaaagtggtaaaactattctcgattttctaaagagcgacggcttcgccaataggaactttatgcagctgatccatgatgactctttaaccttcaaagaggatatacaaaaggcacaggtttccggacaaggggactcattgcacgaacatattgcgaatcttgctggttcgccagccatcaaaaagggcatactccagacagtcaaagtagtggatgagctagttaaggtcatgggacgtcacaaaccggaaaacattgtaatcgagatggcacgcgaaaatcaaacgactcagaaggggcaaaaaaacagtcgagagcggatgaagagaatagaagagggtattaaagaactgggcagccagatcttaaaggagcatcctgtggaaaatacccaattgcagaacgagaaactttacctctattacctacaaaatggaagggacatgtatgttgatcaggaactggacataaaccgtttatctgattacgacgtcgatgccattgtaccccaatcctttttgaaggacgattcaatcgacaataaagtgcttacacgctcggataagaaccgagggaaaagtgacaatgttccaagcgaggaagtcgtaaagaaaatgaagaactattggcggcagctcctaaatgcgaaactgataacgcaaagaaagttcgataacttaactaaagctgagaggggtggcttgtctgaacttgacaaggccggatttattaaacgtcagctcgtggaaacccgccaaatcacaaagcatgttgcacagatactagattcccgaatgaatacgaaatacgacgagaacgataagctgattcgggaagtcaaagtaatcactttaaagtcaaaattggtgtcggacttcagaaaggattttcaattctataaagttagggagataaataactaccaccatgcgcacgacgcttatcttaatgccgtcgtagggaccgcactcattaagaaatacccgaagctagaaagtgagtttgtgtatggtgattacaaagtttatgacgtccgtaagatgatcgcgaaaagcgaacaggagataggcaaggctacagccaaatacttcttttattctaacattatgaatttctttaagacggaaatcactctggcaaacggagagatacgcaaacgacctttaattgaaaccaatggggagacaggtgaaatcgtatgggataagggccgggacttcgcgacggtgagaaaagttttgtccatgccccaagtcaacatagtaaagaaaactgaggtgcagaccggagggttttcaaaggaatcgattcttccaaaaaggaatagtgataagctcatcgctcgtaaaaaggactgggacccgaaaaagtacggtggcttcgatagccctacagttgcctattctgtcctagtagtggcaaaagttgagaagggaaaatccaagaaactgaagtcagtcaaagaattattggggataacgattatggagcgctcgtcttttgaaaagaaccccatcgacttccttgaggcgaaaggttacaaggaagtaaaaaaggatctcataattaaactaccaaagtatagtctgtttgagttagaaaatggccgaaaacggatgttggctagcgccggagagcttcaaaaggggaacgaactcgcactaccgtctaaatacgtgaatttcctgtatttagcgtcccattacgagaagttgaaaggttcacctgaagataacgaacagaagcaactttttgttgagcagcacaaacattatctcgacgaaatcatagagcaaatttcggaattcagtaagagagtcatcctagctgatgccaatctggacaaagtattaagcgcatacaacaagcacagggataaacccatacgtgagcaggcggaaaatattatccatttgtttactcttaccaacctcggcgctccagccgcattcaagtattttgacacaacgatagatcgcaaacgatacacttctaccaaggaggtgctagacgcgacactgattcaccaatccatcacgggattatatgaaactcggatagatttgtcacagcttgggggtgacggatccaactcaaagaaaaggtcactggaggacaacgaaacggaaatcaaagtctccagagacacctggaacactaagaacatgcggtccctggaaccgccacgaagcaagaaacggatacatctcgaggactacaaagaccatgacggtgattataaagatcatgacatcgattacaaggatgacgatgacaagttggtttctgccggaatcagaaaggtgctttttttggacggtattgacaaagctcaggacatggaacaggctccagaagaccagggtcctcaaagggagccccacaacgaatggactttggagcttctggaggaactgaagaacgaagcagttagacattttccccgcatttggttgcatggattgggccaacacatatatgagacctacggggacacttgggccggtgttgaagcaattatacgcatcctccaacaactcttgttcatacattttaggataggctgccgacatagtcgaatcggtgtcacgcaacaacggcgggcacggaacggggcatcccgatcataa

SEQ ID NO: 312 - DNA, 286 bp, Artificial Sequence
  chemically synthesized
ggaacaggctccagaagaccagggtcctcaaagggagccccacaacgaatggactttggagcttctggaggaactgaagaacgaagcagttagacattttccccgcatttggttgcatggattgggccaacacatatatgagacctacggggacacttgggccggtgttgaagcaattatacgcatcctccaacaactcttgttcatacattttaggataggctgccgacatagtcgaatcggtgtcacgcaacaacggcgggcacggaacggggcatcccgatca

SEQ ID NO: 313 - DNA, 1790 bp, Artificial Sequence
  chemically synthesized
atggagcaaaagccaccggtaaagaaagtcaggttgctaggaggtccggcggaggcagcggaggcggaggcagcggcgccaccaacttcagcctgctgaagcaggccggcgacgtggaggagaaccctggacctctcgaggaagacgccaaaaacataaagaaaggcccggcgccattctatccgctggaagatggaaccgctggagagcaactgcataaggctatgaagagatacgccctggttcctggaacaattgcttttacagatgcacatatcgaggtggacatcacttacgctgagtacttcgaaatgtccgttcggttggcagaagctatgaaacgatatgggctgaatacaaatcacagaatcgtcgtatgcagtgaaaactctcttcaattctttatgccggtgttgggcgcgttatttatcggagttgcagttgcgcccgcgaacgacatttataatgaacgtgaattgctcaacagtatgggcatttcgcagcctaccgtggtgttcgtttccaaaaaggggttgcaaaaaattttgaacgtgcaaaaaaagctcccaatcatccaaaaaattattatcatggattctaaaacggattaccagggatttcagtcgatgtacacgttcgtcacatctcatctacctcccggttttaatgaatacgattttgtgccagagtccttcgatagggacaagacaattgcactgatcatgaactcctctggatctactggtctgcctaaaggtgtcgctctgcctcatagaactgcctgcgtgagattctcgcatgccagagatcctatttttggcaatcaaatcattccggatactgcgattttaagtgttgttccattccatcacggttttggaatgtttactacactcggatatttgatatgtggatttcgagtcgtcttaatgtatagatttgaagaagagctgtttctgaggagccttcaggattacaagattcaaagtgcgctgctggtgccaaccctattctccttcttcgccaaaagcactctgattgacaaatacgatttatctaatttacacgaaattgcttctggtggcgctcccctctctaaggaagtcggggaagcggttgccaagaggttccatctgccaggtatcaggcaaggatatgggctcactgagactacatcagctattctgattacacccgagggggatgataaaccgggcgcggtcggtaaagttgttccattttttgaagcgaaggttgtggatctggataccgggaaaacgctgggcgttaatcaaagaggcgaactgtgtgtgagaggtcctatgattatgtccggttatgtaaacaatccggaagcgaccaacgccttgattgacaaggatggatggctacattctggagacatagcttactgggacgaagacgaacacttcttcatcgttgaccgcctgaagtctctgattaagtacaaaggctatcaggtggctcccgctgaattggaatccatcttgctccaacaccccaacatcttcgacgcaggtgtcgcaggtcttcccgacgatgacgccggtgaacttcccgccgccgttgttgttttggagcacggaaagacgatgacggaaaaagagatcgtggattacgtcgccagtcaagtaacaaccgcgaaaaagttgcgcggaggagttgtgtttgtggacgaagtaccgaaaggtcttaccggaaaactcgacgcaagaaaaatcagagagatcctcataaaggccaagaagggcggaaagatcgccgtgtaa

SEQ ID NO: 314 - DNA, 5070 bp, Artificial Sequence
  chemically synthesized
gacattgattattgactagttattaatagtaatcaattacggggtcattagttcatagcccatatatggagttccgcgttacataacttacggtaaatggcccgcctggctgaccgcccaacgacccccgcccattgacgtcaataatgacgtatgttcccatagtaacgccaatagggactttccattgacgtcaatgggtggagtatttacggtaaactgcccacttggcagtacatcaagtgtatcatatgccaagtacgccccctattgacgtcaatgacggtaaatggcccgcctggcattatgcccagtacatgaccttatgggactttcctacttggcagtacatctacgtattagtcatcgctattaccatggtgatgcggttttggcagtacatcaatgggcgtggatagcggtttgactcacggggatttccaagtctccaccccattgacgtcaatgggagtttgttttggcaccaaaatcaacgggactttccaaaatgtcgtaacaactccgccccattgacgcaaatgggcggtaggcgtgtacggtgggaggtctatataagcagcgcgttttgcctgtactgggtctctctggttagaccagatctgagcctgggagctctctggctaactagggaacccactgcttaagcctcaataaagcttgccttgagtgcttcaagtagtgtgtgcccgtctgttgtgtgactctggtaactagagatccctcagacccttttagtcagtgtggaaaatctctagcagtggcgcccgaacagggacttgaaagcgaaagggaaaccagaggagctctctcgacgcaggactcggcttgctgaagcgcgcacggcaagaggcgaggggcggcgactggtgagtacgccaaaaattttgactagcggaggctagaaggagagagatgggtgcgagagcgtcagtattaagcgggggagaattagatcgcgatgggaaaaaattcggttaaggccagggggaaagaaaaaatataaattaaaacatatagtatgggcaagcagggagctagaacgattcgcagttaatcctggcctgttagaaacatcagaaggctgtagacaaatactgggacagctacaaccatcccttcagacaggatcagaagaacttagatcattatataatacagtagcaaccctctattgtgtgcatcaaaggatagagataaaagacaccaaggaagctttagacaagatagaggaagagcaaaacaaaagtaagaccaccgcacagcaagcggccgctgatcttcagacctggaggaggagatatgagggacaattggagaagtgaattatataaatataaagtagtaaaaattgaaccattaggagtagcacccaccaaggcaaagagaagagtggtgcagagagaaaaaagagcagtgggaataggagctttgttccttgggttcttgggagcagcaggaagcactatgggcgcagcgtcaatgacgctgacggtacaggccagacaattattgtctggtatagtgcagcagcagaacaatttgctgagggctattgaggcgcaacagcatctgttgcaactcacagtctggggcatcaagcagctccaggcaagaatcctggctgtggaaagatacctaaaggatcaacagctcctggggatttggggttgctctggaaaactcatttgcaccactgctgtgccttggaatgctagttggagtaataaatctctggaacagatttggaatcacacgacctggatggagtgggacagagaaattaacaattacacaagcttaatacactccttaattgaagaatcgcaaaaccagcaagaaaagaatgaacaagaattattggaattagataaatgggcaagtttgtggaattggtttaacataacaaattggctgtggtatataaaattattcataatgatagtaggaggcttggtaggtttaagaatagtttttgctgtactttctatagtgaatagagttaggcagggatattcaccattatcgtttcagacccacctcccaaccccgaggggacccgacaggcccgaaggaatagaagaagaaggtggagagagagacagagacagatccattcgattagtgaacggatcggcactgcgtgcgccaattctgcagacaaatggcagtattcatccacaattttaaaagaaaaggggggattggggggtacagtgcaggggaaagaatagtagacataatagcaacagacatacaaactaaagaattacaaaaacaaattacaaaaattcaaaattttcgggtttattacagggacagcagagatccagtttggttaattaaggtaccaaggatccggatccgcccctctccctcccccccccctaacgttactggccgaagccgcttggaataaggccggtgtgcgtttgtctatatgttattttccaccatattgccgtcttttggcaatgtgagggcccggaaacctggccctgtcttcttgacgagcattcctaggggtctttcccctctcgccaaaggaatgcaaggtctgttgaatgtcgtgaaggaagcagttcctctggaagcttcttgaagacaaacaacgtctgtagcgaccctttgcaggcagcggaaccccccacctggcgacaggtgcctctgcggccaaaagccacgtgtataagatacacctgcaaaggcggcacaaccccagtgccacgttgtgagttggatagttgtggaaagagtcaaatggctctcctcaagcgtattcaacaaggggctgaaggatgcccagaaggtaccccattgtatgggatctgatctggggcctcggtgcacatgctttacatgtgtttagtcgaggttaaaaaaacgtctaggccccccgaaccacggggacgtggttttcctttgaaaaacacgatgataatatggccacaaccatgaccatggtgagcaagggcgaggaggtcatcaaagagttcatgcgcttcaaggtgcgcatggagggctccatgaacggccacgagttcgagatcgagggcgagggcgagggccgcccctacgagggcacccagaccgccaagctgaaggtgaccaagggcggccccctgcccttcgcctgggacatcctgtccccccagttcatgtacggctccaaggcgtacgtgaagcaccccgccgacatccccgattacaagaagctgtccttccccgagggcttcaagtgggagcgcgtgatgaacttcgaggacggcggtctggtgaccgtgacccaggactcctccctgcaggacggcacgctgatctacaaggtgaagatgcgcggcaccaacttcccccccgacggccccgtaatgcagaagaagaccatgggctgggaggcctccaccgagcgcctgtacccccgcgacggcgtgctgaagggcgagatccaccaggccctgaagctgaaggacggcggccactacctggtggagttcaagaccatctacatggccaagaagcccgtgcaactgcccggctactactacgtggacaccaagctggacatcacctcccacaacgaggactacaccatcgtggaacagtacgagcgctccgagggccgccaccacctgttcctggggcatggcaccggcagcaccggcagcggcagctccggcaccgcctcctccgaggacaacaacatggccgtcatcaaagagttcatgcgcttcaaggtgcgcatggagggctccatgaacggccacgagttcgagatcgagggcgagggcgagggccgcccctacgagggcacccagaccgccaagctgaaggtgaccaagggcggccccctgcccttcgcctgggacatcctgtccccccagttcatgtacggctccaaggcgtacgtgaagcaccccgccgacatccccgattacaagaagctgtccttccccgagggcttcaagtgggagcgcgtgatgaacttcgaggacggcggtctggtgaccgtgacccaggactcctccctgcaggacggcacgctgatctacaaggtgaagatgcgcggcaccaacttcccccccgacggccccgtaatgcagaagaagaccatgggctgggaggcctccaccgagcgcctgtacccccgcgacggcgtgctgaagggcgagatccaccaggccctgaagctgaaggacggcggccgctacctggtggagttcaagaccatctacatggccaagaagcccgtgcaactgcccggctactactacgtggacaccaagctggacatcacctcccacaacgaggactacaccatcgtggaacagtacgagcgctccgagggccgccaccacctgttcctgtacggcatggacgagctgtacaagtagtctagatctagaccgcggcctgctgccggctctgcggcctcttccgcgtcttcgccttcgccctcagacgagtcggatctccctttgggccgcctccccgcgtcgactttaagaccaatgacttacaaggcagctgtagatcttagccactttttaaaagaaaaggggggactggaagggctaattcactcccaacgaagacaagatctgctttttgcttgtactgggtctctctggttagaccagatctgagcctgggagctctctggctaactagggaacccactgcttaagcctcaataaagcttgccttgagtgcttcaagtagtgtgtgcccgtctgttgtgtgactctggtaactagagatccctcagacccttttagtcagtgtggaaaatctctagcagggcccgtttaaacccgctgatcagcctcgactgtgccttctagttgccagccatctgttgtttgcccctcccccgtgccttccttgaccctggaaggtgccactcccactgtcctttcctaataaaatgaggaaattgcatcgcattgtctgagtaggtgtcattctattctggggggtggggtggggcaggacagcaagggggaggattgggaagacaatagcaggcatgctggggatgcggtgggctctatg

SEQ ID NO: 315 - DNA, 6954 bp, Artificial Sequence
  chemically synthesized
atgaatttgccaggaagatggaaaccaaaaatgatagggggaattggaggttttatcaaagtaagacagtatgatcagatactcatagaaatctgcggacataaagctataggtacagtattagtaggacctacacctgtcaacataattggaagaaatctgttgactcagattggctgcactttaaattttcccattagtcctattgagactgtaccagtaaaattaaagccaggaatggatggcccaaaagttaaacaatggccattgacagaagaaaaaataaaagcattagtagaaatttgtacagaaatggaaaaggaaggaaaaatttcaaaaattgggcctgaaaatccatacaatactccagtatttgccataaagaaaaaagacagtactaaatggagaaaattagtagatttcagagaacttaataagagaactcaagatttctgggaagttcaattaggaataccacatcctgcagggttaaaacagaaaaaatcagtaacagtactggatgtgggcgatgcatatttttcagttcccttagataaagacttcaggaagtatactgcatttaccatacctagtataaacaatgagacaccagggattagatatcagtacaatgtgcttccacagggatggaaaggatcaccagcaatattccagtgtagcatgacaaaaatcttagagccttttagaaaacaaaatccagacatagtcatctatcaatacatggatgatttgtatgtaggatctgacttagaaatagggcagcatagaacaaaaatagaggaactgagacaacatctgttgaggtggggatttaccacaccagacaaaaaacatcagaaagaacctccattcctttggatgggttatgaactccatcctgataaatggacagtacagcctatagtgctgccagaaaaggacagctggactgtcaatgacatacagaaattagtgggaaaattgaattgggcaagtcagatttatgcagggattaaagtaaggcaattatgtaaacttcttaggggaaccaaagcactaacagaagtagtaccactaacagaagaagcagagctagaactggcagaaaacagggagattctaaaagaaccggtacatggagtgtattatgacccatcaaaagacttaatagcagaaatacagaagcaggggcaaggccaatggacatatcaaatttatcaagagccatttaaaaatctgaaaacaggaaagtatgcaagaatgaagggtgcccacactaatgatgtgaaacaattaacagaggcagtacaaaaaatagccacagaaagcatagtaatatggggaaagactcctaaatttaaattacccatacaaaaggaaacatgggaagcatggtggacagagtattggcaagccacctggattcctgagtgggagtttgtcaatacccctcccttagtgaagttatggtaccagttagagaaagaacccataataggagcagaaactttctatgtagatggggcagccaatagggaaactaaattaggaaaagcaggatatgtaactgacagaggaagacaaaaagttgtccccctaacggacacaacaaatcagaagactgagttacaagcaattcatctagctttgcaggattcgggattagaagtaaacatagtgacagactcacaatatgcattgggaatcattcaagcacaaccagataagagtgaatcagagttagtcagtcaaataatagagcagttaataaaaaaggaaaaagtctacctggcatgggtaccagcacacaaaggaattggaggaaatgaacaagtagataaattggtcagtgctggaatcaggaaagtactatttttagatggaatagataaggcccaagaacccggtgccaccatgcccaaaaagaagaggaaagtcagctcttttttggacggtattgacaaagctcaggacgaacatgaaaagtaccactctaactggagagctatggcctccgattttaatcttccgccggtggtagcgaaagaaatcgttgccagttgcgacaaatgccaattgaagggagaagccatgcatggtcaagtggattgttcccccggaatatggcaactcgattgcacgcatctggaaggcaaggtcatcctcgtagcggtacatgttgcttctggatatattgaggccgaggttataccggcagaaacgggccaagaaacagcgtactttctcctgaagcttgcgggacgctggcctgtgaaaacgattcataccgacaacggttctaactttaccggagcaacagtacgggccgcatgctggtgggccggtataaagcaggaatttgggattccatacaatccgcaaagtcaaggtgtcgtcgagtctatgaataaggaactcaaaaagataattggtcaggttagagatcaagccgaacatctcaagacggcggtccaaatggcagtttttattcacaactttaagaggaaaggtgggattggtggctattcagcaggggagcgaatagtggacataatagcaaccgacatacagactaaggagttgcaaaagcagatcacaaagattcaaaatgggggcgggggaagcggcggtggaggtagtggagggggaggatcagataaaaagtattctattggtttagccatcggcactaattccgttggatgggctgtcataaccgatgaatacaaagtaccttcaaagaaatttaaggtgttggggaacacagaccgtcattcgattaaaaagaatcttatcggtgccctcctattcgatagtggcgaaacggcagaggcgactcgcctgaaacgaaccgctcggagaaggtatacacgtcgcaagaaccgaatatgttacttacaagaaatttttagcaatgagatggccaaagttgacgattctttctttcaccgtttggaagagtccttccttgtcgaagaggacaagaaacatgaacggcaccccatctttggaaacatagtagatgaggtggcatatcatgaaaagtacccaacgatttatcacctcagaaaaaagctagttgactcaactgataaagcggacctgaggttaatctacttggctcttgcccatatgataaagttccgtgggcactttctcattgagggtgatctaaatccggacaactcggatgtcgacaaactgttcatccagttagtacaaacctataatcagttgtttgaagagaaccctataaatgcaagtggcgtggatgcgaaggctattcttagcgcccgcctctctaaatcccgacggctagaaaacctgatcgcacaattacccggagagaagaaaaatgggttgttcggtaaccttatagcgctctcactaggcctgacaccaaattttaagtcgaacttcgacttagctgaagatgccaaattgcagcttagtaaggacacgtacgatgacgatctcgacaatctactggcacaaattggagatcagtatgcggacttatttttggctgccaaaaaccttagcgatgcaatcctcctatctgacatactgagagttaatactgagattaccaaggcgccgttatccgcttcaatgatcaaaaggtacgatgaacatcaccaagacttgacacttctcaaggccctagtccgtcagcaactgcctgagaaatataaggaaatattctttgatcagtcgaaaaacgggtacgcaggttatattgacggcggagcgagtcaagaggaattctacaagtttatcaaacccatattagagaagatggatgggacggaagagttgcttgtaaaactcaatcgcgaagatctactgcgaaagcagcggactttcgacaacggtagcattccacatcaaatccacttaggcgaattgcatgctatacttagaaggcaggaggatttttatccgttcctcaaagacaatcgtgaaaagattgagaaaatcctaacctttcgcataccttactatgtgggacccctggcccgagggaactctcggttcgcatggatgacaagaaagtccgaagaaacgattactccatggaattttgaggaagttgtcgataaaggtgcgtcagctcaatcgttcatcgagaggatgaccaactttgacaagaatttaccgaacgaaaaagtattgcctaagcacagtttactttacgagtatttcacagtgtacaatgaactcacgaaagttaagtatgtcactgagggcatgcgtaaacccgcctttctaagcggagaacagaagaaagcaatagtagatctgttattcaagaccaaccgcaaagtgacagttaagcaattgaaagaggactactttaagaaaattgaatgcttcgattctgtcgagatctccggggtagaagatcgatttaatgcgtcacttggtacgtatcatgacctcctaaagataattaaagataaggacttcctggataacgaagagaatgaagatatcttagaagatatagtgttgactcttaccctctttgaagatcgggaaatgattgaggaaagactaaaaacatacgctcacctgttcgacgataaggttatgaaacagttaaagaggcgtcgctatacgggctggggacgattgtcgcggaaacttatcaacgggataagagacaagcaaagtggtaaaactattctcgattttctaaagagcgacggcttcgccaataggaactttatgcagctgatccatgatgactctttaaccttcaaagaggatatacaaaaggcacaggtttccggacaaggggactcattgcacgaacatattgcgaatcttgctggttcgccagccatcaaaaagggcatactccagacagtcaaagtagtggatgagctagttaaggtcatgggacgtcacaaaccggaaaacattgtaatcgagatggcacgcgaaaatcaaacgactcagaaggggcaaaaaaacagtcgagagcggatgaagagaatagaagagggtattaaagaactgggcagccagatcttaaaggagcatcctgtggaaaatacccaattgcagaacgagaaactttacctctattacctacaaaatggaagggacatgtatgttgatcaggaactggacataaaccgtttatctgattacgacgtcgatgccattgtaccccaatcctttttgaaggacgattcaatcgacaataaagtgcttacacgctcggataagaaccgagggaaaagtgacaatgttccaagcgaggaagtcgtaaagaaaatgaagaactattggcggcagctcctaaatgcgaaactgataacgcaaagaaagttcgataacttaactaaagctgagaggggtggcttgtctgaacttgacaaggccggatttattaaacgtcagctcgtggaaacccgccaaatcacaaagcatgttgcacagatactagattcccgaatgaatacgaaatacgacgagaacgataagctgattcgggaagtcaaagtaatcactttaaagtcaaaattggtgtcggacttcagaaaggattttcaattctataaagttagggagataaataactaccaccatgcgcacgacgcttatcttaatgccgtcgtagggaccgcactcattaagaaatacccgaagctagaaagtgagtttgtgtatggtgattacaaagtttatgacgtccgtaagatgatcgcgaaaagcgaacaggagataggcaaggctacagccaaatacttcttttattctaacattatgaatttctttaagacggaaatcactctggcaaacggagagatacgcaaacgacctttaattgaaaccaatggggagacaggtgaaatcgtatgggataagggccgggacttcgcgacggtgagaaaagttttgtccatgccccaagtcaacatagtaaagaaaactgaggtgcagaccggagggttttcaaaggaatcgattcttccaaaaaggaatagtgataagctcatcgctcgtaaaaaggactgggacccgaaaaagtacggtggcttcgatagccctacagttgcctattctgtcctagtagtggcaaaagttgagaagggaaaatccaagaaactgaagtcagtcaaagaattattggggataacgattatggagcgctcgtcttttgaaaagaaccccatcgacttccttgaggcgaaaggttacaaggaagtaaaaaaggatctcataattaaactaccaaagtatagtctgtttgagttagaaaatggccgaaaacggatgttggctagcgccggagagcttcaaaaggggaacgaactcgcactaccgtctaaatacgtgaatttcctgtatttagcgtcccattacgagaagttgaaaggttcacctgaagataacgaacagaagcaactttttgttgagcagcacaaacattatctcgacgaaatcatagagcaaatttcggaattcagtaagagagtcatcctagctgatgccaatctggacaaagtattaagcgcatacaacaagcacagggataaacccatacgtgagcaggcggaaaatattatccatttgtttactcttaccaacctcggcgctccagccgcattcaagtattttgacacaacgatagatcgcaaacgatacacttctaccaaggaggtgctagacgcgacactgattcaccaatccatcacgggattatatgaaactcggatagatttgtcacagcttgggggtgacggatccaactcaaagaaaaggtcactggaggacaacgaaacggaaatcaaagtctccagagacacctggaacactaagaacatgcggtccctggaaccgccacgaagcaagaaacggatacatctcgaggactacaaagaccatgacggtgattataaagatcatgacatcgattacaaggatgacgatgacaagtaa

SEQ ID NO: 316 - DNA, 6939 bp, Artificial Sequence
  chemically synthesized
atgaatttgccaggaagatggaaaccaaaaatgatagggggaattggaggttttatcaaagtaagacagtatgatcagatactcatagaaatctgcggacataaagctataggtacagtattagtaggacctacacctgtcaacataattggaagaaatctgttgactcagattggctgcactttaaattttcccattagtcctattgagactgtaccagtaaaattaaagccaggaatggatggcccaaaagttaaacaatggccattgacagaagaaaaaataaaagcattagtagaaatttgtacagaaatggaaaaggaaggaaaaatttcaaaaattgggcctgaaaatccatacaatactccagtatttgccataaagaaaaaagacagtactaaatggagaaaattagtagatttcagagaacttaataagagaactcaagatttctgggaagttcaattaggaataccacatcctgcagggttaaaacagaaaaaatcagtaacagtactggatgtgggcgatgcatatttttcagttcccttagataaagacttcaggaagtatactgcatttaccatacctagtataaacaatgagacaccagggattagatatcagtacaatgtgcttccacagggatggaaaggatcaccagcaatattccagtgtagcatgacaaaaatcttagagccttttagaaaacaaaatccagacatagtcatctatcaatacatggatgatttgtatgtaggatctgacttagaaatagggcagcatagaacaaaaatagaggaactgagacaacatctgttgaggtggggatttaccacaccagacaaaaaacatcagaaagaacctccattcctttggatgggttatgaactccatcctgataaatggacagtacagcctatagtgctgccagaaaaggacagctggactgtcaatgacatacagaaattagtgggaaaattgaattgggcaagtcagatttatgcagggattaaagtaaggcaattatgtaaacttcttaggggaaccaaagcactaacagaagtagtaccactaacagaagaagcagagctagaactggcagaaaacagggagattctaaaagaaccggtacatggagtgtattatgacccatcaaaagacttaatagcagaaatacagaagcaggggcaaggccaatggacatatcaaatttatcaagagccatttaaaaatctgaaaacaggaaagtatgcaagaatgaagggtgcccacactaatgatgtgaaacaattaacagaggcagtacaaaaaatagccacagaaagcatagtaatatggggaaagactcctaaatttaaattacccatacaaaaggaaacatgggaagcatggtggacagagtattggcaagccacctggattcctgagtgggagtttgtcaatacccctcccttagtgaagttatggtaccagttagagaaagaacccataataggagcagaaactttctatgtagatggggcagccaatagggaaactaaattaggaaaagcaggatatgtaactgacagaggaagacaaaaagttgtccccctaacggacacaacaaatcagaagactgagttacaagcaattcatctagctttgcaggattcgggattagaagtaaacatagtgacagactcacaatatgcattgggaatcattcaagcacaaccagataagagtgaatcagagttagtcagtcaaataatagagcagttaataaaaaaggaaaaagtctacctggcatgggtaccagcacacaaaggaattggaggaaatgaacaagtagataaattggtcagtgctggaatcaggaaagtactatttttagatggaatagataaggcccaagaacccggtgccaccatggactacaaagaccatgacggtgattataaagatcatgacatcgattacaaggatgacgatgacaagggcggaaactcaaagaaaaggtcactggaggacaacgaaacggaaatcaaagtctccagagacacctggaacactaagaacatgcggtccctggaaccgccacgaagcaagaaacggatacatggaggcgataaaaagtattctattggtttagccatcggcactaattccgttggatgggctgtcataaccgatgaatacaaagtaccttcaaagaaatttaaggtgttggggaacacagaccgtcattcgattaaaaagaatcttatcggtgccctcctattcgatagtggcgaaacggcagaggcgactcgcctgaaacgaaccgctcggagaaggtatacacgtcgcaagaaccgaatatgttacttacaagaaatttttagcaatgagatggccaaagttgacgattctttctttcaccgtttggaagagtccttccttgtcgaagaggacaagaaacatgaacggcaccccatctttggaaacatagtagatgaggtggcatatcatgaaaagtacccaacgatttatcacctcagaaaaaagctagttgactcaactgataaagcggacctgaggttaatctacttggctcttgcccatatgataaagttccgtgggcactttctcattgagggtgatctaaatccggacaactcggatgtcgacaaactgttcatccagttagtacaaacctataatcagttgtttgaagagaaccctataaatgcaagtggcgtggatgcgaaggctattcttagcgcccgcctctctaaatcccgacggctagaaaacctgatcgcacaattacccggagagaagaaaaatgggttgttcggtaaccttatagcgctctcactaggcctgacaccaaattttaagtcgaacttcgacttagctgaagatgccaaattgcagcttagtaaggacacgtacgatgacgatctcgacaatctactggcacaaattggagatcagtatgcggacttatttttggctgccaaaaaccttagcgatgcaatcctcctatctgacatactgagagttaatactgagattaccaaggcgccgttatccgcttcaatgatcaaaaggtacgatgaacatcaccaagacttgacacttctcaaggccctagtccgtcagcaactgcctgagaaatataaggaaatattctttgatcagtcgaaaaacgggtacgcaggttatattgacggcggagcgagtcaagaggaattctacaagtttatcaaacccatattagagaagatggatgggacggaagagttgcttgtaaaactcaatcgcgaagatctactgcgaaagcagcggactttcgacaacggtagcattccacatcaaatccacttaggcgaattgcatgctatacttagaaggcaggaggatttttatccgttcctcaaagacaatcgtgaaaagattgagaaaatcctaacctttcgcataccttactatgtgggacccctggcccgagggaactctcggttcgcatggatgacaagaaagtccgaagaaacgattactccatggaattttgaggaagttgtcgataaaggtgcgtcagctcaatcgttcatcgagaggatgaccaactttgacaagaatttaccgaacgaaaaagtattgcctaagcacagtttactttacgagtatttcacagtgtacaatgaactcacgaaagttaagtatgtcactgagggcatgcgtaaacccgcctttctaagcggagaacagaagaaagcaatagtagatctgttattcaagaccaaccgcaaagtgacagttaagcaattgaaagaggactactttaagaaaattgaatgcttcgattctgtcgagatctccggggtagaagatcgatttaatgcgtcacttggtacgtatcatgacctcctaaagataattaaagataaggacttcctggataacgaagagaatgaagatatcttagaagatatagtgttgactcttaccctctttgaagatcgggaaatgattgaggaaagactaaaaacatacgctcacctgttcgacgataaggttatgaaacagttaaagaggcgtcgctatacgggctggggacgattgtcgcggaaacttatcaacgggataagagacaagcaaagtggtaaaactattctcgattttctaaagagcgacggcttcgccaataggaactttatgcagctgatccatgatgactctttaaccttcaaagaggatatacaaaaggcacaggtttccggacaaggggactcattgcacgaacatattgcgaatcttgctggttcgccagccatcaaaaagggcatactccagacagtcaaagtagtggatgagctagttaaggtcatgggacgtcacaaaccggaaaacattgtaatcgagatggcacgcgaaaatcaaacgactcagaaggggcaaaaaaacagtcgagagcggatgaagagaatagaagagggtattaaagaactgggcagccagatcttaaaggagcatcctgtggaaaatacccaattgcagaacgagaaactttacctctattacctacaaaatggaagggacatgtatgttgatcaggaactggacataaaccgtttatctgattacgacgtcgatgccattgtaccccaatcctttttgaaggacgattcaatcgacaataaagtgcttacacgctcggataagaaccgagggaaaagtgacaatgttccaagcgaggaagtcgtaaagaaaatgaagaactattggcggcagctcctaaatgcgaaactgataacgcaaagaaagttcgataacttaactaaagctgagaggggtggcttgtctgaacttgacaaggccggatttattaaacgtcagctcgtggaaacccgccaaatcacaaagcatgttgcacagatactagattcccgaatgaatacgaaatacgacgagaacgataagctgattcgggaagtcaaagtaatcactttaaagtcaaaattggtgtcggacttcagaaaggattttcaattctataaagttagggagataaataactaccaccatgcgcacgacgcttatcttaatgccgtcgtagggaccgcactcattaagaaatacccgaagctagaaagtgagtttgtgtatggtgattacaaagtttatgacgtccgtaagatgatcgcgaaaagcgaacaggagataggcaaggctacagccaaatacttcttttattctaacattatgaatttctttaagacggaaatcactctggcaaacggagagatacgcaaacgacctttaattgaaaccaatggggagacaggtgaaatcgtatgggataagggccgggacttcgcgacggtgagaaaagttttgtccatgccccaagtcaacatagtaaagaaaactgaggtgcagaccggagggttttcaaaggaatcgattcttccaaaaaggaatagtgataagctcatcgctcgtaaaaaggactgggacccgaaaaagtacggtggcttcgatagccctacagttgcctattctgtcctagtagtggcaaaagttgagaagggaaaatccaagaaactgaagtcagtcaaagaattattggggataacgattatggagcgctcgtcttttgaaaagaaccccatcgacttccttgaggcgaaaggttacaaggaagtaaaaaaggatctcataattaaactaccaaagtatagtctgtttgagttagaaaatggccgaaaacggatgttggctagcgccggagagcttcaaaaggggaacgaactcgcactaccgtctaaatacgtgaatttcctgtatttagcgtcccattacgagaagttgaaaggttcacctgaagataacgaacagaagcaactttttgttgagcagcacaaacattatctcgacgaaatcatagagcaaatttcggaattcagtaagagagtcatcctagctgatgccaatctggacaaagtattaagcgcatacaacaagcacagggataaacccatacgtgagcaggcggaaaatattatccatttgtttactcttaccaacctcggcgctccagccgcattcaagtattttgacacaacgatagatcgcaaacgatacacttctaccaaggaggtgctagacgcgacactgattcaccaatccatcacgggattatatgaaactcggatagatttgtcacagcttgggggtgacggatccggaggtggaggaagcggcggtggaggtagtggaggtggaggatcactcgagtttttggacggtattgacaaagctcaggacgaacatgaaaagtaccactctaactggagagctatggcctccgattttaatcttccgccggtggtagcgaaagaaatcgttgccagttgcgacaaatgccaattgaagggagaagccatgcatggtcaagtggattgttcccccggaatatggcaactcgattgcacgcatctggaaggcaaggtcatcctcgtagcggtacatgttgcttctggatatattgaggccgaggttataccggcagaaacgggccaagaaacagcgtactttctcctgaagcttgcgggacgctggcctgtgaaaacgattcataccgacaacggttctaactttaccggagcaacagtacgggccgcatgctggtgggccggtataaagcaggaatttgggattccatacaatccgcaaagtcaaggtgtcgtcgagtctatgaataaggaactcaaaaagataattggtcaggttagagatcaagccgaacatctcaagacggcggtccaaatggcagtttttattcacaactttaagaggaaaggtgggattggtggctattcagcaggggagcgaatagtggacataatagcaaccgacatacagactaaggagttgcaaaagcagatcacaaagattcaaaattaa

SEQ ID NO: 317 - DNA, 5634 bp, Artificial Sequence
  chemically synthesized
atgaatttgccaggaagatggaaaccaaaaatgatagggggaattggaggttttatcaaagtaagacagtatgatcagatactcatagaaatctgcggacataaagctataggtacagtattagtaggacctacacctgtcaacataattggaagaaatctgttgactcagattggctgcactttaaattttcccattagtcctattgagactgtaccagtaaaattaaagccaggaatggatggcccaaaagttaaacaatggccattgacagaagaaaaaataaaagcattagtagaaatttgtacagaaatggaaaaggaaggaaaaatttcaaaaattgggcctgaaaatccatacaatactccagtatttgccataaagaaaaaagacagtactaaatggagaaaattagtagatttcagagaacttaataagagaactcaagatttctgggaagttcaattaggaataccacatcctgcagggttaaaacagaaaaaatcagtaacagtactggatgtgggcgatgcatatttttcagttcccttagataaagacttcaggaagtatactgcatttaccatacctagtataaacaatgagacaccagggattagatatcagtacaatgtgcttccacagggatggaaaggatcaccagcaatattccagtgtagcatgacaaaaatcttagagccttttagaaaacaaaatccagacatagtcatctatcaatacatggatgatttgtatgtaggatctgacttagaaatagggcagcatagaacaaaaatagaggaactgagacaacatctgttgaggtggggatttaccacaccagacaaaaaacatcagaaagaacctccattcctttggatgggttatgaactccatcctgataaatggacagtacagcctatagtgctgccagaaaaggacagctggactgtcaatgacatacagaaattagtgggaaaattgaattgggcaagtcagatttatgcagggattaaagtaaggcaattatgtaaacttcttaggggaaccaaagcactaacagaagtagtaccactaacagaagaagcagagctagaactggcagaaaacagggagattctaaaagaaccggtacatggagtgtattatgacccatcaaaagacttaatagcagaaatacagaagcaggggcaaggccaatggacatatcaaatttatcaagagccatttaaaaatctgaaaacaggaaagtatgcaagaatgaagggtgcccacactaatgatgtgaaacaattaacagaggcagtacaaaaaatagccacagaaagcatagtaatatggggaaagactcctaaatttaaattacccatacaaaaggaaacatgggaagcatggtggacagagtattggcaagccacctggattcctgagtgggagtttgtcaatacccctcccttagtgaagttatggtaccagttagagaaagaacccataataggagcagaaactttctatgtagatggggcagccaatagggaaactaaattaggaaaagcaggatatgtaactgacagaggaagacaaaaagttgtccccctaacggacacaacaaatcagaagactgagttacaagcaattcatctagctttgcaggattcgggattagaagtaaacatagtgacagactcacaatatgcattgggaatcattcaagcacaaccagataagagtgaatcagagttagtcagtcaaataatagagcagttaataaaaaaggaaaaagtctacctggcatgggtaccagcacacaaaggaattggaggaaatgaacaagtagataaattggtcagtgctggaatcaggaaagtactatttttagatggaatagataaggcccaagaacccggtgccaccatggactacaaagaccatgacggtgattataaagatcatgacatcgactacaaggatgacgatgacaagggcggaaactcaaagaaaaggtcactggaggacaacgaaacggaaatcaaagtctccagagacacctggaacactaagaacatgcggtccctggaaccgccacgaagcaagaaacggatacatggaggccccgggggaatcgattacaaggatgacgatgacaagatggcccccaagaagaagaggaaggtgggcattcaccgcggggtacctatggtggacttgaggacactcggttattcgcaacagcaacaggagaaaatcaagcctaaggtcaggagcaccgtcgcgcaacaccacgaggcgcttgtggggcatggcttcactcatgcgcatattgtcgcgctttcacagcaccctgcggcgcttgggacggtggctgtcaaataccaagatatgattgcggccctgcccgaagccacgcacgaggcaattgtaggggtcggtaaacagtggtcgggagcgcgagcacttgaggcgctgctgactgtggcgggtgagcttagggggcctccgctccagctcgacaccgggcagctgctgaagatcgcgaagagagggggagtaacagcggtagaggcagtgcacgcctggcgcaatgcgctcaccggggcccccttgaacctgaccccagaccaggtagtcgcaatcgcgaacaataatgggggaaagcaagccctggaaaccgtgcaaaggttgttgccggtcctttgtcaagaccacggccttacaccggagcaagtcgtggccattgcaagcaacatcggtggcaaacaggctcttgagacggttcagagacttctcccagttctctgtcaagcccacgggctgactcccgatcaagttgtagcgattgcgtcgaacattggagggaaacaagcattggagactgtccaacggctccttcccgtgttgtgtcaagcccacggtttgacgcctgcacaagtggtcgccatcgccaacaacaacggcggtaagcaggcgctggaaacagtacagcgcctgctgcctgtactgtgccaggatcatggactgaccccagaccaggtagtcgcaatcgcgtcaaacggagggggaaagcaagccctggaaaccgtgcaaaggttgttgccggtcctttgtcaagaccacggccttacaccggagcaagtcgtggccattgcaagcaatgggggtggcaaacaggctcttgagacggttcagagacttctcccagttctctgtcaagcccacgggctgactcccgatcaagttgtagcgattgcgtcgcatgacggagggaaacaagcattggagactgtccaacggctccttcccgtgttgtgtcaagcccacggtttgacgcctgcacaagtggtcgccatcgcctccaatattggcggtaagcaggcgctggaaacagtacagcgcctgctgcctgtactgtgccaggatcatggactgaccccagaccaggtagtcgcaatcgcgtcaaacggagggggaaagcaagccctggaaaccgtgcaaaggttgttgccggtcctttgtcaagaccacggccttacaccggagcaagtcgtggccattgcatcccacgacggtggcaaacaggctcttgagacggttcagagacttctcccagttctctgtcaagcccacgggctgactcccgatcaagttgtagcgattgcgtccaacggtggagggaaacaagcattggagactgtccaacggctccttcccgtgttgtgtcaagcccacggtttgacgcctgcacaagtggtcgccatcgccaacaacaacggcggtaagcaggcgctggaaacagtacagcgcctgctgcctgtactgtgccaggatcatggactgaccccagaccaggtagtcgcaatcgcgtcacatgacgggggaaagcaagccctggaaaccgtgcaaaggttgttgccggtcctttgtcaagaccacggccttacaccggagcaagtcgtggccattgcaagcaacatcggtggcaaacaggctcttgagacggttcagagacttctcccagttctctgtcaagcccacgggctgactcccgatcaagttgtagcgattgcgtcgcatgacggagggaaacaagcattggagactgtccaacggctccttcccgtgttgtgtcaagcccacggtttgacgcctgcacaagtggtcgccatcgccagccatgatggcggtaagcaggcgctggaaacagtacagcgcctgctgcctgtactgtgccaggatcatggactgaccccagaccaggtagtcgcaatcgcgtcgaacattgggggaaagcaagccctggaaaccgtgcaaaggttgttgccggtcctttgtcaagaccacggcctgacacccgaacaggtggtcgccattgcttcccacgacggaggacggccagccttggagtccatcgtagcccaattgtccaggcccgatcccgcgttggctgcgttaacgaatgaccatctggtggcgttggcatgtcttggtggacgacccgcgctcgatgcagtcaaaaagggtctgcctcatgctcccgcattgatcaaaagaaccaaccggcggattcccgagagaacttcccatcgagtcgcgggatccacgcgtttcttggacggtattgacaaagctcaggacgaacatgaaaagtaccactctaactggagagctatggcctccgattttaatcttccgccggtggtagcgaaagaaatcgttgccagttgcgacaaatgccaattgaagggagaagccatgcatggtcaagtggattgttcccccggaatatggcaactcgattgcacgcatctggaaggcaaggtcatcctcgtagcggtacatgttgcttctggatatattggcgccgaggttataccggcagaaacgggccaagaaacagcgtactttctcctgaaacttgcgggacgctggcctgtgaaaacgattcataccgacaacggttctaactttaccggagcaacagtacgggccgcatgctggtgggccggtataaagcaggaatttgggattccatacaatccgcaaagtcaaggtgtcgtcgagtctatgaataaggaactcaaaaagataattggtcaggttagagatcaagccgaacatctcaagacggcggtccaaatggcagtttttattcacaactttaagaggaaaggtgggattggtggctattcagcaggggagcgaatagtggacataatagcaaccgacatacagactaaggagttgcaaaagcagatcacaaagattcaaaatctcgagtaatgacttaagacagcagtacaaatggcagtattcatccacaattttaaaagaaaaggggggattggggggtacagtgcaggggaaagaatagtagacataatagcaacagacatacaaactaaagaattacaaaaacaaattacaaaaattcaaaattttcgggtttattacagggacagcagagatccagtttggaaaggaccagcaaagctcctctggaaaggtgaaggggcagtagtaatacaagataatagtgacataaaagtagtgccaagaagaaaagcaaagatcatcagggattatggaaaacagatggcaggtgatgattgtgtggcaagtagacaggatgaggattaa

SEQ ID NO: 318 - DNA, 5415 bp, Artificial Sequence
  chemically synthesized
atgaatttgccaggaagatggaaaccaaaaatgatagggggaattggaggttttatcaaagtaagacagtatgatcagatactcatagaaatctgcggacataaagctataggtacagtattagtaggacctacacctgtcaacataattggaagaaatctgttgactcagattggctgcactttaaattttcccattagtcctattgagactgtaccagtaaaattaaagccaggaatggatggcccaaaagttaaacaatggccattgacagaagaaaaaataaaagcattagtagaaatttgtacagaaatggaaaaggaaggaaaaatttcaaaaattgggcctgaaaatccatacaatactccagtatttgccataaagaaaaaagacagtactaaatggagaaaattagtagatttcagagaacttaataagagaactcaagatttctgggaagttcaattaggaataccacatcctgcagggttaaaacagaaaaaatcagtaacagtactggatgtgggcgatgcatatttttcagttcccttagataaagacttcaggaagtatactgcatttaccatacctagtataaacaatgagacaccagggattagatatcagtacaatgtgcttccacagggatggaaaggatcaccagcaatattccagtgtagcatgacaaaaatcttagagccttttagaaaacaaaatccagacatagtcatctatcaatacatggatgatttgtatgtaggatctgacttagaaatagggcagcatagaacaaaaatagaggaactgagacaacatctgttgaggtggggatttaccacaccagacaaaaaacatcagaaagaacctccattcctttggatgggttatgaactccatcctgataaatggacagtacagcctatagtgctgccagaaaaggacagctggactgtcaatgacatacagaaattagtgggaaaattgaattgggcaagtcagatttatgcagggattaaagtaaggcaattatgtaaacttcttaggggaaccaaagcactaacagaagtagtaccactaacagaagaagcagagctagaactggcagaaaacagggagattctaaaagaaccggtacatggagtgtattatgacccatcaaaagacttaatagcagaaatacagaagcaggggcaaggccaatggacatatcaaatttatcaagagccatttaaaaatctgaaaacaggaaagtatgcaagaatgaagggtgcccacactaatgatgtgaaacaattaacagaggcagtacaaaaaatagccacagaaagcatagtaatatggggaaagactcctaaatttaaattacccatacaaaaggaaacatgggaagcatggtggacagagtattggcaagccacctggattcctgagtgggagtttgtcaatacccctcccttagtgaagttatggtaccagttagagaaagaacccataataggagcagaaactttctatgtagatggggcagccaatagggaaactaaattaggaaaagcaggatatgtaactgacagaggaagacaaaaagttgtccccctaacggacacaacaaatcagaagactgagttacaagcaattcatctagctttgcaggattcgggattagaagtaaacatagtgacagactcacaatatgcattgggaatcattcaagcacaaccagataagagtgaatcagagttagtcagtcaaataatagagcagttaataaaaaaggaaaaagtctacctggcatgggtaccagcacacaaaggaattggaggaaatgaacaagtagataaattggtcagtgctggaatcaggaaagtactatttttagatggaatagataaggcccaagaacccggtgccaccatgacgcgtttcttggacggtattgacaaagctcaggacgaacatgaaaagtaccactctaactggagagctatggcctccgattttaatcttccgccggtggtagcgaaagaaatcgttgccagttgcgacaaatgccaattgaagggagaagccatgcatggtcaagtggattgttcccccggaatatggcaactcgattgcacgcatctggaaggcaaggtcatcctcgtagcggtacatgttgcttctggatatattggcgccgaggttataccggcagaaacgggccaagaaacagcgtactttctcctgaaacttgcgggacgctggcctgtgaaaacgattcataccgacaacggttctaactttaccggagcaacagtacgggccgcatgctggtgggccggtataaagcaggaatttgggattccatacaatccgcaaagtcaaggtgtcgtcgagtctatgaataaggaactcaaaaagataattggtcaggttagagatcaagccgaacatctcaagacggcggtccaaatggcagtttttattcacaactttaagaggaaaggtgggattggtggctattcagcaggggagcgaatagtggacataatagcaaccgacatacagactaaggagttgcaaaagcagatcacaaagattcaaaatctcgaggggggcgggggaagcggcggtggaggtagtggagggggaggatcacccgggatcgattacaaggatgacgatgacaagatggcccccaagaagaagaggaaggtgggcattcaccgcggggtacctatggtggacttgaggacactcggttattcgcaacagcaacaggagaaaatcaagcctaaggtcaggagcaccgtcgcgcaacaccacgaggcgcttgtggggcatggcttcactcatgcgcatattgtcgcgctttcacagcaccctgcggcgcttgggacggtggctgtcaaataccaagatatgattgcggccctgcccgaagccacgcacgaggcaattgtaggggtcggtaaacagtggtcgggagcgcgagcacttgaggcgctgctgactgtggcgggtgagcttagggggcctccgctccagctcgacaccgggcagctgctgaagatcgcgaagagagggggagtaacagcggtagaggcagtgcacgcctggcgcaatgcgctcaccggggcccccttgaacctgaccccagaccaggtagtcgcaatcgcgtcaaacggagggggaaagcaagccctggaaaccgtgcaaaggttgttgccggtcctttgtcaagaccacggccttacaccggagcaagtcgtggccattgcatcccacgacggtggcaaacaggctcttgagacggttcagagacttctcccagttctctgtcaagcccacgggctgactcccgatcaagttgtagcgattgcgtcgaacattggagggaaacaagcattggagactgtccaacggctccttcccgtgttgtgtcaagcccacggtttgacgcctgcacaagtggtcgccatcgcctccaatattggcggtaagcaggcgctggaaacagtacagcgcctgctgcctgtactgtgccaggatcatggactgaccccagaccaggtagtcgcaatcgcgaacaataatgggggaaagcaagccctggaaaccgtgcaaaggttgttgccggtcctttgtcaagaccacggccttacaccggagcaagtcgtggccattgcaagcaatgggggtggcaaacaggctcttgagacggttcagagacttctcccagttctctgtcaagcccacgggctgactcccgatcaagttgtagcgattgcgtcgcatgacggagggaaacaagcattggagactgtccaacggctccttcccgtgttgtgtcaagcccacggtttgacgcctgcacaagtggtcgccatcgccagccatgatggcggtaagcaggcgctggaaacagtacagcgcctgctgcctgtactgtgccaggatcatggactgaccccagaccaggtagtcgcaatcgcgaacaataatgggggaaagcaagccctggaaaccgtgcaaaggttgttgccggtcctttgtcaagaccacggccttacaccggagcaagtcgtggccattgcatcccacgacggtggcaaacaggctcttgagacggttcagagacttctcccagttctctgtcaagcccacgggctgactcccgatcaagttgtagcgattgcgtcgcatgacggagggaaacaagcattggagactgtccaacggctccttcccgtgttgtgtcaagcccacggtttgacgcctgcacaagtggtcgccatcgcctccaatattggcggtaagcaggcgctggaaacagtacagcgcctgctgcctgtactgtgccaggatcatggactgaccccagaccaggtagtcgcaatcgcgtcaaacggagggggaaagcaagccctggaaaccgtgcaaaggttgttgccggtcctttgtcaagaccacggccttacaccggagcaagtcgtggccattgcaaataataacggtggcaaacaggctcttgagacggttcagagacttctcccagttctctgtcaagcccacgggctgactcccgatcaagttgtagcgattgcgtcgcatgacggagggaaacaagcattggagactgtccaacggctccttcccgtgttgtgtcaagcccacggtttgacgcctgcacaagtggtcgccatcgccagccatgatggcggtaagcaggcgctggaaacagtacagcgcctgctgcctgtactgtgccaggatcatggactgaccccagaccaggtagtcgcaatcgcgtcacatgacgggggaaagcaagccctggaaaccgtgcaaaggttgttgccggtcctttgtcaagaccacggccttacaccggagcaagtcgtggccattgcaaataataacggtggcaaacaggctcttgagacggttcagagacttctcccagttctctgtcaagcccacgggctgacacccgaacaggtggtcgccattgcttctaatgggggaggacggccagccttggagtccatcgtagcccaattgtccaggcccgatcccgcgttggctgcgttaacgaatgaccatctggtggcgttggcatgtcttggtggacgacccgcgctcgatgcagtcaaaaagggtctgcctcatgctcccgcattgatcaaaagaaccaaccggcggattcccgagagaacttcccatcgagtcgcgggatccaactcaaagaaaaggtcactggaggacaacgaaacggaaatcaaagtctccagagacacctggaacactaagaacatgcggtccctggaaccgccacgaagcaagaaacggatacatggcggagactacaaagaccatgacggtgattataaagatcatgacatcgactacaaggatgacgatgacaagtaa

SEQ ID NO: 319 - DNA, 5415 bp, Artificial Sequence; identical to SEQ ID NO: 318
  chemically synthesized

SEQ ID NO: 320 - DNA, 5313 bp, Artificial Sequence
  chemically synthesized
atgaatttgccaggaagatggaaaccaaaaatgatagggggaattggaggttttatcaaagtaagacagtatgatcagatactcatagaaatctgcggacataaagctataggtacagtattagtaggacctacacctgtcaacataattggaagaaatctgttgactcagattggctgcactttaaattttcccattagtcctattgagactgtaccagtaaaattaaagccaggaatggatggcccaaaagttaaacaatggccattgacagaagaaaaaataaaagcattagtagaaatttgtacagaaatggaaaaggaaggaaaaatttcaaaaattgggcctgaaaatccatacaatactccagtatttgccataaagaaaaaagacagtactaaatggagaaaattagtagatttcagagaacttaataagagaactcaagatttctgggaagttcaattaggaataccacatcctgcagggttaaaacagaaaaaatcagtaacagtactggatgtgggcgatgcatatttttcagttcccttagataaagacttcaggaagtatactgcatttaccatacctagtataaacaatgagacaccagggattagatatcagtacaatgtgcttccacagggatggaaaggatcaccagcaatattccagtgtagcatgacaaaaatcttagagccttttagaaaacaaaatccagacatagtcatctatcaatacatggatgatttgtatgtaggatctgacttagaaatagggcagcatagaacaaaaatagaggaactgagacaacatctgttgaggtggggatttaccacaccagacaaaaaacatcagaaagaacctccattcctttggatgggttatgaactccatcctgataaatggacagtacagcctatagtgctgccagaaaaggacagctggactgtcaatgacatacagaaattagtgggaaaattgaattgggcaagtcagatttatgcagggattaaagtaaggcaattatgtaaacttcttaggggaaccaaagcactaacagaagtagtaccactaacagaagaagcagagctagaactggcagaaaacagggagattctaaaagaaccggtacatggagtgtattatgacccatcaaaagacttaatagcagaaatacagaagcaggggcaaggccaatggacatatcaaatttatcaagagccatttaaaaatctgaaaacaggaaagtatgcaagaatgaagggtgcccacactaatgatgtgaaacaattaacagaggcagtacaaaaaatagccacagaaagcatagtaatatggggaaagactcctaaatttaaattacccatacaaaaggaaacatgggaagcatggtggacagagtattggcaagccacctggattcctgagtgggagtttgtcaatacccctcccttagtgaagttatggtaccagttagagaaagaacccataataggagcagaaactttctatgtagatggggcagccaatagggaaactaaattaggaaaagcaggatatgtaactgacagaggaagacaaaaagttgtccccctaacggacacaacaaatcagaagactgagttacaagcaattcatctagctttgcaggattcgggattagaagtaaacatagtgacagactcacaatatgcattgggaatcattcaagcacaaccagataagagtgaatcagagttagtcagtcaaataatagagcagttaataaaaaaggaaaaagtctacctggcatgggtaccagcacacaaaggaattggaggaaatgaacaagtagataaattggtcagtgctggaatcaggaaagtactatttttagatggaatagataaggcccaagaacccggtgccaccatgacgcgtttcttggacggtattgacaaagctcaggacgaacatgaaaagtaccactctaactggagagctatggcctccgattttaatcttccgccggtggtagcgaaagaaatcgttgccagttgcgacaaatgccaattgaagggagaagccatgcatggtcaagtggattgttcccccggaatatggcaactcgattgcacgcatctggaaggcaaggtcatcctcgtagcggtacatgttgcttctggatatattggcgccgaggttataccggcagaaacgggccaagaaacagcgtactttctcctgaaacttgcgggacgctggcctgtgaaaacgattcataccgacaacggttctaactttaccggagcaacagtacgggccgcatgctggtgggccggtataaagcaggaatttgggattccatacaatccgcaaagtcaaggtgtcgtcgagtctatgaataaggaactcaaaaagataattggtcaggttagagatcaagccgaacatctcaagacggcggtccaaatggcagtttttattcacaactttaagaggaaaggtgggattggtggctattcagcaggggagcgaatagtggacataatagcaaccgacatacagactaaggagttgcaaaagcagatcacaaagattcaaaatctcgaggggggcgggggaagcggcggtggaggtagtggagggggaggatcacccgggatcgattacaaggatgacgatgacaagatggcccccaagaagaagaggaaggtgggcattcaccgcggggtacctatggtggacttgaggacactcggttattcgcaacagcaacaggagaaaatcaagcctaaggtcaggagcaccgtcgcgcaacaccacgaggcgcttgtggggcatggcttcactcatgcgcatattgtcgcgctttcacagcaccctgcggcgcttgggacggtggctgtcaaataccaagatatgattgcggccctgcccgaagccacgcacgaggcaattgtaggggtcggtaaacagtggtcgggagcgcgagcacttgaggcgctgctgactgtggcgggtgagcttagggggcctccgctccagctcgacaccgggcagctgctgaagatcgcgaagagagggggagtaacagcggtagaggcagtgcacgcctggcgcaatgcgctcaccggggcccccttgaacctgaccccagaccaggtagtcgcaatcgcgaacaataatgggggaaagcaagccctggaaaccgtgcaaaggttgttgccggtcctttgtcaagaccacggccttacaccggagcaagtcgtggccattgcaagcaatgggggtggcaaacaggctcttgagacggttcagagacttctcccagttctctgtcaagcccacgggctgactcccgatcaagttgtagcgattgcgaataacaatggagggaaacaagcattggagactgtccaacggctccttcccgtgttgtgtcaagcccacggtttgacgcctgcacaagtggtcgccatcgccaacaacaacggcggtaagcaggcgctggaaacagtacagcgcctgctgcctgtactgtgccaggatcatggactgaccccagaccaggtagtcgcaatcgcgtcaaacggagggggaaagcaagccctggaaaccgtgcaaaggttgttgccggtcctttgtcaagaccacggccttacaccggagcaagtcgtggccattgcatcccacgacggtggcaaacaggctcttgagacggttcagagacttctcccagttctctgtcaagcccacgggctgactcccgatcaagttgtagcgattgcgaataacaatggagggaaacaagcattggagactgtccaacggctccttcccgtgttgtgtcaagcccacggtttgacgcctgcacaagtggtcgccatcgccaacaacaacggcggtaagcaggcgctggaaacagtacagcgcctgctgcctgtactgtgccaggatcatggactgaccccagaccaggtagtcgcaatcgcgaacaataatgggggaaagcaagccctggaaaccgtgcaaaggttgttgccggtcctttgtcaagaccacggccttacaccggagcaagtcgtggccattgcaaataataacggtggcaaacaggctcttgagacggttcagagacttctcccagttctctgtcaagcccacgggctgactcccgatcaagttgtagcgattgcgtccaacggtggagggaaacaagcattggagactgtccaacggctccttcccgtgttgtgtcaagcccacggtttgacgcctgcacaagtggtcgccatcgcctccaatattggcggtaagcaggcgctggaaacagtacagcgcctgctgcctgtactgtgccaggatcatggactgaccccagaccaggtagtcgcaatcgcgaacaataatgggggaaagcaagccctggaaaccgtgcaaaggttgttgccggtcctttgtcaagaccacggccttacaccggagcaagtcgtggccattgcatcccacgacggtggcaaacaggctcttgagacggttcagagacttctcccagttctctgtcaagcccacgggctgactcccgatcaagttgtagcgattgcgaataacaatggagggaaacaagcattggagactgtccaacggctccttcccgtgttgtgtcaagcccacggtttgacgcctgcacaagtggtcgccatcgccaacaacaacggcggtaagcaggcgctggaaacagtacagcgcctgctgcctgtactgtgccaggatcatggactgaccccagaccaggtagtcgcaatcgcgtcacatgacgggggaaagcaagccctggaaaccgtgcaaaggttgttgccggtcctttgtcaagaccacggcctgacacccgaacaggtggtcgccattgcttctaatgggggaggacggccagccttggagtccatcgtagcccaattgtccaggcccgatcccgcgttggctgcgttaacgaatgaccatctggtggcgttggcatgtcttggtggacgacccgcgctcgatgcagtcaaaaagggtctgcctcatgctcccgcattgatcaaaagaaccaaccggcggattcccgagagaacttcccatcgagtcgcgggatccaactcaaagaaaaggtcactggaggacaacgaaacggaaatcaaagtctccagagacacctggaacactaagaacatgcggtccctggaaccgccacgaagcaagaaacggatacatggcggagactacaaagaccatgacggtgattataaagatcatgacatcgactacaaggatgacgatgacaagtaa

SEQ ID NO: 321 - DNA, 19 bp, Artificial Sequence
  chemically synthesized
tcacgagggtgggccaggg

SEQ ID NO: 322 - DNA, 19 bp, Artificial Sequence
  chemically synthesized
tgtggtcggggtagcggct

SEQ ID NO: 323 - DNA, 19 bp, Artificial Sequence
  chemically synthesized
tgtggtcggggtagcggct

SEQ ID NO: 324 - DNA, 20 bp, Artificial Sequence
  chemically synthesized
ttcaagtccgccatgcccga

SEQ ID NO: 325 - DNA, 3363 bp, Artificial Sequence
  chemically synthesized
atggactacaaagaccatgacggtgattataaagatcatgacatcgactacaaggatgacgatgacaagggcggaaactcaaagaaaaggtcactggaggacaacgaaacggaaatcaaagtctccagagacacctggaacactaagaacatgcggtccctggaaccgccacgaagcaagaaacggatacatggaggccccgggggaatcgattacaaggatgacgatgacaagatggcccccaagaagaagaggaaggtgggcattcaccgcggggtacctatggtggacttgaggacactcggttattcgcaacagcaacaggagaaaatcaagcctaaggtcaggagcaccgtcgcgcaacaccacgaggcgcttgtggggcatggcttcactcatgcgcatattgtcgcgctttcacagcaccctgcggcgcttgggacggtggctgtcaaataccaagatatgattgcggccctgcccgaagccacgcacgaggcaattgtaggggtcggtaaacagtggtcgggagcgcgagcacttgaggcgctgctgactgtggcgggtgagcttagggggcctccgctccagctcgacaccgggcagctgctgaagatcgcgaagagagggggagtaacagcggtagaggcagtgcacgcctggcgcaatgcgctcaccggggcccccttgaacctgaccccagaccaggtagtcgcaatcgcgaacaataatgggggaaagcaagccctggaaaccgtgcaaaggttgttgccggtcctttgtcaagaccacggccttacaccggagcaagtcgtggccattgcaagcaacatcggtggcaaacaggctcttgagacggttcagagacttctcccagttctctgtcaagcccacgggctgactcccgatcaagttgtagcgattgcgtcgaacattggagggaaacaagcattggagactgtccaacggctccttcccgtgttgtgtcaagcccacggtttgacgcctgcacaagtggtcgccatcgccaacaacaacggcggtaagcaggcgctggaaacagtacagcgcctgctgcctgtactgtgccaggatcatggactgaccccagaccaggtagtcgcaatcgcgtcaaacggagggggaaagcaagccctggaaaccgtgcaaaggttgttgccggtcctttgtcaagaccacggccttacaccggagcaagtcgtggccattgcaagcaatgggggtggcaaacaggctcttgagacggttcagagacttctcccagttctctgtcaagcccacgggctgactcccgatcaagttgtagcgattgcgtcgcatgacggagggaaacaagcattggagactgtccaacggctccttcccgtgttgtgtcaagcccacggtttgacgcctgcacaagtggtcgccatcgcctccaatattggcggtaagcaggcgctggaaacagtacagcgcctgctgcctgtactgtgccaggatcatggactgaccccagaccaggtagtcgcaatcgcgtcaaacggagggggaaagcaagccctggaaaccgtgcaaaggttgttgccggtcctttgtcaagaccacggccttacaccggagcaagtcgtggccattgcatcccacgacggtggcaaacaggctcttgagacggttcagagacttctcccagttctctgtcaagcccacgggctgactcccgatcaagttgtagcgattgcgtccaacggtggagggaaacaagcattggagactgtccaacggctccttcccgtgttgtgtcaagcccacggtttgacgcctgcacaagtggtcgccatcgccaacaacaacggcggtaagcaggcgctggaaacagtacagcgcctgctgcctgtactgtgccaggatcatggactgaccccagaccaggtagtcgcaatcgcgtcacatgacgggggaaagcaagccctggaaaccgtgcaaaggttgttgccggtcctttgtcaagaccacggccttacaccggagcaagtcgtggccattgcaagcaacatcggtggcaaacaggctcttgagacggttcagagacttctcccagttctctgtcaagcccacgggctgactcccgatcaagttgtagcgattgcgtcgcatgacggagggaaacaagcattggagactgtccaacggctccttcccgtgttgtgtcaagcccacggtttgacgcctgcacaagtggtcgccatcgccagccatgatggcggtaagcaggcgctggaaacagtacagcgcctgctgcctgtactgtgccaggatcatggactgaccccagaccaggtagtcgcaatcgcgtcgaacattgggggaaagcaagccctggaaaccgtgcaaaggttgttgccggtcctttgtcaagaccacggcctgacacccgaacaggtggtcgccattgcttcccacgacggaggacggccagccttggagtccatcgtagcccaattgtccaggcccgatcccgcgttggctgcgttaacgaatgaccatctggtggcgttggcatgtcttggtggacgacccgcgctcgatgcagtcaaaaagggtctgcctcatgctcccgcattgatcaaaagaaccaaccggcggattcccgagagaacttcccatcgagtcgcgggatccacgcgtttcttggacggtattgacaaagctcaggacgaacatgaaaagtaccactctaactggagagctatggcctccgattttaatcttccgccggtggtagcgaaagaaatcgttgccagttgcgacaaatgccaattgaagggagaagccatgcatggtcaagtggattgttcccccggaatatggcaactcgattgcacgcatctggaaggcaaggtcatcctcgtagcggtacatgttgcttctggatatattggcgccgaggttataccggcagaaacgggccaagaaacagcgtactttctcctgaaacttgcgggacgctggcctgtgaaaacgattcataccgacaacggttctaactttaccggagcaacagtacgggccgcatgctggtgggccggtataaagcaggaatttgggattccatacaatccgcaaagtcaaggtgtcgtcgagtctatgaataaggaactcaaaaagataattggtcaggttagagatcaagccgaacatctcaagacggcggtccaaatggcagtttttattcacaactttaagaggaaaggtgggattggtggctattcagcaggggagcgaatagtggacataatagcaaccgacatacagactaaggagttgcaaaagcagatcacaaagattcaaaatctcgagtaa

SEQ ID NO: 326 - DNA, 3465 bp, Artificial Sequence
  chemically synthesized
atggactacaaagaccatgacggtgattataaagatcatgacatcgactacaaggatgacgatgacaagggcggaaactcaaagaaaaggtcactggaggacaacgaaacggaaatcaaagtctccagagacacctggaacactaagaacatgcggtccctggaaccgccacgaagcaagaaacggatacatggaggccccgggggaatcgattacaaggatgacgatgacaagatggcccccaagaagaagaggaaggtgggcattcaccgcggggtacctatggtggacttgaggacactcggttattcgcaacagcaacaggagaaaatcaagcctaaggtcaggagcaccgtcgcgcaacaccacgaggcgcttgtggggcatggcttcactcatgcgcatattgtcgcgctttcacagcaccctgcggcgcttgggacggtggctgtcaaataccaagatatgattgcggccctgcccgaagccacgcacgaggcaattgtaggggtcggtaaacagtggtcgggagcgcgagcacttgaggcgctgctgactgtggcgggtgagcttagggggcctccgctccagctcgacaccgggcagctgctgaagatcgcgaagagagggggagtaacagcggtagaggcagtgcacgcctggcgcaatgcgctcaccggggcccccttgaacctgaccccagaccaggtagtcgcaatcgcgtcacatgacgggggaaagcaagccctggaaaccgtgcaaaggttgttgccggtcctttgtcaagaccacggccttacaccggagcaagtcgtggccattgcaagcaacatcggtggcaaacaggctcttgagacggttcagagacttctcccagttctctgtcaagcccacgggctgactcccgatcaagttgtagcgattgcgtcgcatgacggagggaaacaagcattggagactgtccaacggctccttcccgtgttgtgtcaagcccacggtttgacgcctgcacaagtggtcgccatcgccaacaacaacggcggtaagcaggcgctggaaacagtacagcgcctgctgcctgtactgtgccaggatcatggactgaccccagaccaggtagtcgcaatcgcgtcgaacattgggggaaagcaagccctggaaaccgtgcaaaggttgttgccggtcctttgtcaagaccacggccttacaccggagcaagtcgtggccattgcaaataataacggtggcaaacaggctcttgagacggttcagagacttctcccagttctctgtcaagcccacgggctgactcccgatcaagttgtagcgattgcgaataacaatggagggaaacaagcattggagactgtccaacggctccttcccgtgttgtgtcaagcccacggtttgacgcctgcacaagtggtcgccatcgccaacaacaacggcggtaagcaggcgctggaaacagtacagcgcctgctgcctgtactgtgccaggatcatggactgaccccagaccaggtagtcgcaatcgcgtcaaacggagggggaaagcaagccctggaaaccgtgcaaaggttgttgccggtcctttgtcaagaccacggccttacaccggagcaagtcgtggccattgcaaataataacggtggcaaacaggctcttgagacggttcagagacttctcccagttctctgtcaagcccacgggctgactcccgatcaagttgtagcgattgcgaataacaatggagggaaacaagcattggagactgtccaacggctccttcccgtgttgtgtcaagcccacggtttgacgcctgcacaagtggtcgccatcgccaacaacaacggcggtaagcaggcgctggaaacagtacagcgcctgctgcctgtactgtgccaggatcatggactgaccccagaccaggtagtcgcaatcgcgtcacatgacgggggaaagcaagccctggaaaccgtgcaaaggttgttgccggtcctttgtcaagaccacggccttacaccggagcaagtcgtggccattgcatcccacgacggtggcaaacaggctcttgagacggttcagagacttctcccagttctctgtcaagcccacgggctgactcccgatcaagttgtagcgattgcgtcgaacattggagggaaacaagcattggagactgtccaacggctccttcccgtgttgtgtcaagcccacggtttgacgcctgcacaagtggtcgccatcgccaacaacaacggcggtaagcaggcgctggaaacagtacagcgcctgctgcctgtactgtgccaggatcatggactgaccccagaccaggtagtcgcaatcgcgaacaataatgggggaaagcaagccctggaaaccgtgcaaaggttgttgccggtcctttgtcaagaccacggcctgaccccagaccaggtagtcgcaatcgcgaacaataatgggggaaagcaagccctggaaaccgtgcaaaggttgttgccggtcctttgtcaagaccacggcctgacacccgaacaggtggtcgccattgctaataataacggaggacggccagccttggagtccatcgtagcccaattgtccaggcccgatcccgcgttggctgcgttaacgaatgaccatctggtggcgttggcatgtcttggtggacgacccgcgctcgatgcagtcaaaaagggtctgcctcatgctcccgcattgatcaaaagaaccaaccggcggattcccgagagaacttcccatcgagtcgcgggatccacgcgtttcttggacggtattgacaaagctcaggacgaacatgaaaagtaccactctaactggagagctatggcctccgattttaatcttccgccggtggtagcgaaagaaatcgttgccagttgcgacaaatgccaattgaagggagaagccatgcatggtcaagtggattgttcccccggaatatggcaactcgattgcacgcatctggaaggcaaggtcatcctcgtagcggtacatgttgcttctggatatattggcgccgaggttataccggcagaaacgggccaagaaacagcgtactttctcctgaaacttgcgggacgctggcctgtgaaaacgattcataccgacaacggttctaactttaccggagcaacagtacgggccgcatgctggtgggccggtataaagcaggaatttgggattccatacaatccgcaaagtcaaggtgtcgtcgagtctatgaataaggaactcaaaaagataattggtcaggttagagatcaagccgaacatctcaagacggcggtccaaatggcagtttttattcacaactttaagaggaaaggtgggattggtggctattcagcaggggagcgaatagtggacataatagcaaccgacatacagactaaggagttgcaaaagcagatcacaaagattcaaaatctcgagtaa

SEQ ID NO: 327 - DNA, 3465 bp, Artificial Sequence
  chemically synthesized
atggactacaaagaccatgacggtgattataaagatcatgacatcgactacaaggatgacgatgacaagggcggaaactcaaagaaaaggtcactggaggacaacgaaacggaaatcaaagtctccagagacacctggaacactaagaacatgcggtccctggaaccgccacgaagcaagaaacggatacatggaggccccgggggaatcgattacaaggatgacgatgacaagatggcccccaagaagaagaggaaggtgggcattcaccgcggggtacctatggtggacttgaggacactcggttattcgcaacagcaacaggagaaaatcaagcctaaggtcaggagcaccgtcgcgcaacaccacgaggcgcttgtggggcatggcttcactcatgcgcatattgtcgcgctttcacagcaccctgcggcgcttgggacggtggctgtcaaataccaagatatgattgcggccctgcccgaagccacgcacgaggcaattgtaggggtcggtaaacagtggtcgggagcgcgagcacttgaggcgctgctgactgtggcgggtgagcttagggggcctccgctccagctcgacaccgggcagctgctgaagatcgcgaagagagggggagtaacagcggtagaggcagtgcacgcctggcgcaatgcgctcaccggggcccccttgaacctgaccccagaccaggtagtcgcaatcgcgtcgaacattgggggaaagcaagccctggaaaccgtgcaaaggttgttgccggtcctttgtcaagaccacggccttacaccggagcaagtcgtggccattgcaaataataacggtggcaaacaggctcttgagacggttcagagacttctcccagttctctgtcaagcccacgggctgactcccgatcaagttgtagcgattgcgaataacaatggagggaaacaagcattggagactgtccaacggctccttcccgtgttgtgtcaagcccacggtttgacgcctgcacaagtggtcgccatcgcctcgaatggcggcggtaagcaggcgctggaaacagtacagcgcctgctgcctgtactgtgccaggatcatggactgaccccagaccaggtagtcgcaatcgcgtcacatgacgggggaaagcaagccctggaaaccgtgcaaaggttgttgccggtcctttgtcaagaccacggccttacaccggagcaagtcgtggccattgcaagcaacatcggtggcaaacaggctcttgagacggttcagagacttctcccagttctctgtcaagcccacgggctgactcccgatcaagttgtagcgattgcgaataacaatggagggaaacaagcattggagactgtccaacggctccttcccgtgttgtgtcaagcccacggtttgacgcctgcacaagtggtcgccatcgccaacaacaacggcggtaagcaggcgctggaaacagtacagcgcctgctgcctgtactgtgccaggatcatggactgaccccagaccaggtagtcgcaatcgcgaacaataatgggggaaagcaagccctggaaaccgtgcaaaggttgttgccggtcctttgtcaagaccacggccttacaccggagcaagtcgtggccattgcaagcaatgggggtggcaaacaggctcttgagacggttcagagacttctcccagttctctgtcaagcccacgggctgactcccgatcaagttgtagcgattgcgaataacaatggagggaaacaagcattggagactgtccaacggctccttcccgtgttgtgtcaagcccacggtttgacgcctgcacaagtggtcgccatcgccaacaacaacggcggtaagcaggcgctggaaacagtacagcgcctgctgcctgtactgtgccaggatcatggactgaccccagaccaggtagtcgcaatcgcgtcaaacggagggggaaagcaagccctggaaaccgtgcaaaggttgttgccggtcctttgtcaagaccacggccttacaccggagcaagtcgtggccattgcatcccacgacggtggcaaacaggctcttgagacggttcagagacttctcccagttctctgtcaagcccacgggctgactcccgatcaagttgtagcgattgcgtcgaacattggagggaaacaagcattggagactgtccaacggctccttcccgtgttgtgtcaagcccacggtttgacgcctgcacaagtggtcgccatcgccagccatgatggcggtaagcaggcgctggaaacagtacagcgcctgctgcctgtactgtgccaggatcatggactgaccccagaccaggtagtcgcaatcgcgaacaataatgggggaaagcaagccctggaaaccgtgcaaaggttgttgccggtcctttgtcaagaccacggccttacaccggagcaagtcgtggccattgcaagcaacatcggtggcaaacaggctcttgagacggttcagagacttctcccagttctctgtcaagcccacgggctgacacccgaacaggtggtcgccattgctaataataacggaggacggccagccttggagtccatcgtagcccaattgtccaggcccgatcccgcgttggctgcgttaacgaatgaccatctggtggcgttggcatgtcttggtggacgacccgcgctcgatgcagtcaaaaagggtctgcctcatgctcccgcattgatcaaaagaaccaaccggcggattcccgagagaacttcccatcgagtcgcgggatccacgcgtttcttggacggtattgacaaagctcaggacgaacatgaaaagtaccactctaactggagagctatggcctccgattttaatcttccgccggtggtagcgaaagaaatcgttgccagttgcgacaaatgccaattgaagggagaagccatgcatggtcaagtggattgttcccccggaatatggcaactcgattgcacgcatctggaaggcaaggtcatcctcgtagcggtacatgttgcttctggatatattggcgccgaggttataccggcagaaacgggccaagaaacagcgtactttctcctgaaacttgcgggacgctggcctgtgaaaacgattcataccgacaacggttctaactttaccggagcaacagtacgggccgcatgctggtgggccggtataaagcaggaatttgggattccatacaatccgcaaagtcaaggtgtcgtcgagtctatgaataaggaactcaaaaagataattggtcaggttagagatcaagccgaacatctcaagacggcggtccaaatggcagtttttattcacaactttaagaggaaaggtgggattggtggctattcagcaggggagcgaatagtggacataatagcaaccgacatacagactaaggagttgcaaaagcagatcacaaagattcaaaatctcgagtaa

SEQ ID NO: 328 - DNA, 3402 bp, Artificial Sequence
  chemically synthesized
atgacgcgtttcttggacggtattgacaaagctcaggacgaacatgaaaagtaccactctaactggagagctatggcctccgattttaatcttccgccggtggtagcgaaagaaatcgttgccagttgcgacaaatgccaattgaagggagaagccatgcatggtcaagtggattgttcccccggaatatggcaactcgattgcacgcatctggaaggcaaggtcatcctcgtagcggtacatgttgcttctggatatattggcgccgaggttataccggcagaaacgggccaagaaacagcgtactttctcctgaaacttgcgggacgctggcctgtgaaaacgattcataccgacaacggttctaactttaccggagcaacagtacgggccgcatgctggtgggccggtataaagcaggaatttgggattccatacaatccgcaaagtcaaggtgtcgtcgagtctatgaataaggaactcaaaaagataattggtcaggttagagatcaagccgaacatctcaagacggcggtccaaatggcagtttttattcacaactttaagaggaaaggtgggattggtggctattcagcaggggagcgaatagtggacataatagcaaccgacatacagactaaggagttgcaaaagcagatcacaaagattcaaaatctcgaggggggcgggggaagcggcggtggaggtagtggagggggaggatcacccgggggaatcgattacaaggatgacgatgacaagatggcccccaagaagaagaggaaggtgggcattcaccgcggggtacctatggtggacttgaggacactcggttattcgcaacagcaacaggagaaaatcaagcctaaggtcaggagcaccgtcgcgcaacaccacgaggcgcttgtggggcatggcttcactcatgcgcatattgtcgcgctttcacagcaccctgcggcgcttgggacggtggctgtcaaataccaagatatgattgcggccctgcccgaagccacgcacgaggcaattgtaggggtcggtaaacagtggtcgggagcgcgagcacttgaggcgctgctgactgtggcgggtgagcttagggggcctccgctccagctcgacaccgggcagctgctgaagatcgcgaagagagggggagtaacagcggtagaggcagtgcacgcctggcgcaatgcgctcaccggggcccccttgaacctgaccccagaccaggtagtcgcaatcgcgaacaataatgggggaaagcaagccctggaaaccgtgcaaaggttgttgccggtcctttgtcaagaccacggccttacaccggagcaagtcgtggccattgcaagcaatgggggtggcaaacaggctcttgagacggttcagagacttctcccagttctctgtcaagcccacgggctgactcccgatcaagttgtagcgattgcgaataacaatggagggaaacaagcattggagactgtccaacggctccttcccgtgttgtgtcaagcccacggtttgacgcctgcacaagtggtcgccatcgccaacaacaacggcggtaagcaggcgctggaaacagtacagcgcctgctgcctgtactgtgccaggatcatggactgaccccagaccaggtagtcgcaatcgcgtcaaacggagggggaaagcaagccctggaaaccgtgcaaaggttgttgccggtcctttgtcaagaccacggccttacaccggagcaagtcgtggccattgcatcccacgacggtggcaaacaggctcttgagacggttcagagacttctcccagttctctgtcaagcccacgggctgactcccgatcaagttgtagcgattgcgaataacaatggagggaaacaagcattggagactgtccaacggctccttcccgtgttgtgtcaagcccacggtttgacgcctgcacaagtggtcgccatcgccaacaacaacggcggtaagcaggcgctggaaacagtacagcgcctgctgcctgtactgtgccaggatcatggactgaccccagaccaggtagtcgcaatcgcgaacaataatgggggaaagcaagccctggaaaccgtgcaaaggttgttgccggtcctttgtcaagaccacggccttacaccggagcaagtcgtggccattgcaaataataacggtggcaaacaggctcttgagacggttcagagacttctcccagttctctgtcaagcccacgggctgactcccgatcaagttgtagcgattgcgtccaacggtggagggaaacaagcattggagactgtccaacggctccttcccgtgttgtgtcaagcccacggtttgacgcctgcacaagtggtcgccatcgcctccaatattggcggtaagcaggcgctggaaacagtacagcgcctgctgcctgtactgtgccaggatcatggactgaccccagaccaggtagtcgcaatcgcgaacaataatgggggaaagcaagccctggaaaccgtgcaaaggttgttgccggtcctttgtcaagaccacggccttacaccggagcaagtcgtggccattgcatcccacgacggtggcaaacaggctcttgagacggttcagagacttctcccagttctctgtcaagcccacgggctgactcccgatcaagttgtagcgattgcgaataacaatggagggaaacaagcattggagactgtccaacggctccttcccgtgttgtgtcaagcccacggtttgacgcctgcacaagtggtcgccatcgccaacaacaacggcggtaagcaggcgctggaaacagtacagcgcctgctgcctgtactgtgccaggatcatggactgaccccagaccaggtagtcgcaatcgcgtcacatgacgggggaaagcaagccctggaaaccgtgcaaaggttgttgccggtcctttgtcaagaccacggcctgacacccgaacaggtggtcgccattgcttctaatgggggaggacggccagccttggagtccatcgtagcccaattgtccaggcccgatcccgcgttggctgcgttaacgaatgaccatctggtggcgttggcatgtcttggtggacgacccgcgctcgatgcagtcaaaaagggtctgcctcatgctcccgcattgatcaaaagaaccaaccggcggattcccgagagaacttcccatcgagtcgcgggatccaactcaaagaaaaggtcactggaggacaacgaaacggaaatcaaagtctccagagacacctggaacactaagaacatgcggtccctggaaccgccacgaagcaagaaacggatacatggcggagactacaaagaccatgacggtgattataaagatcatgacatcgactacaaggatgacgatgacaagtaa

SEQ ID NO: 329 - DNA, 3504 bp, Artificial Sequence
  chemically synthesized
atgacgcgtttcttggacggtattgacaaagctcaggacgaacatgaaaagtaccactctaactggagagctatggcctccgattttaatcttccgccggtggtagcgaaagaaatcgttgccagttgcgacaaatgccaattgaagggagaagccatgcatggtcaagtggattgttcccccggaatatggcaactcgattgcacgcatctggaaggcaaggtcatcctcgtagcggtacatgttgcttctggatatattggcgccgaggttataccggcagaaacgggccaagaaacagcgtactttctcctgaaacttgcgggacgctggcctgtgaaaacgattcataccgacaacggttctaactttaccggagcaacagtacgggccgcatgctggtgggccggtataaagcaggaatttgggattccatacaatccgcaaagtcaaggtgtcgtcgagtctatgaataaggaactcaaaaagataattggtcaggttagagatcaagccgaacatctcaagacggcggtccaaatggcagtttttattcacaactttaagaggaaaggtgggattggtggctattcagcaggggagcgaatagtggacataatagcaaccgacatacagactaaggagttgcaaaagcagatcacaaagattcaaaatctcgaggggggcgggggaagcggcggtggaggtagtggagggggaggatcacccgggggaatcgattacaaggatgacgatgacaagatggcccccaagaagaagaggaaggtgggcattcaccgcggggtacctatggtggacttgaggacactcggttattcgcaacagcaacaggagaaaatcaagcctaaggtcaggagcaccgtcgcgcaacaccacgaggcgcttgtggggcatggcttcactcatgcgcatattgtcgcgctttcacagcaccctgcggcgcttgggacggtggctgtcaaataccaagatatgattgcggccctgcccgaagccacgcacgaggcaattgtaggggtcggtaaacagtggtcgggagcgcgagcacttgaggcgctgctgactgtggcgggtgagcttagggggcctccgctccagctcgacaccgggcagctgctgaagatcgcgaacagagggggagtaacagcggtagaggcagtgcacgcctggcgcaatgcgctcaccggggcccccttgaacctgaccccagaccaggtagtcgcaatcgcgtcaaacggagggggaaagcaagccctggaaaccgtgcaaaggttgttgccggtcctttgtcaagaccacggccttacaccggagcaagtcgtggccattgcatcccacgacggtggcaaacaggctcttgagacggttcagagacttctcccagttctctgtcaagcccacgggctgactcccgatcaagttgtagcgattgcgtcgaacattggagggaaacaagcattggagactgtccaacggctccttcccgtgttgtgtcaagcccacggtttgacgcctgcacaagtggtcgccatcgcctccaatattggcggtaagcaggcgctggaaacagtacagcgcctgctgcctgtactgtgccaggatcatggactgaccccagaccaggtagtcgcaatcgcgaacaataatgggggaaagcaagccctggaaaccgtgcaaaggttgttgccggtcctttgtcaagaccacggccttacaccggagcaagtcgtggccattgcaagcaatgggggtggcaaacaggctcttgagacggttcagagacttctcccagttctctgtcaagcccacgggctgactcccgatcaagttgtagcgattgcgtcgcatgacggagggaaacaagcattggagactgtccaacggctccttcccgtgttgtgtcaagcccacggtttgacgcctgcacaagtggtcgccatcgccagccatgatggcggtaagcaggcgctggaaacagtacagcgcctgctgcctgtactgtgccaggatcatggactgaccccagaccaggtagtcgcaatcgcgaacaataatgggggaaagcaagccctggaaaccgtgcaaaggttgttgccggtcctttgtcaagaccacggccttacaccggagcaagtcgtggccattgcatcccacgacggtggcaaacaggctcttgagacggttcagagacttctcccagttctctgtcaagcccacgggctgactcccgatcaagttgtagcgattgcgtcgcatgacggagggaaacaagcattggagactgtccaacggctccttcccgtgttgtgtcaagcccacggtttgacgcctgcacaagtggtcgccatcgcctccaatattggcggtaagcaggcgctggaaacagtacagcgcctgctgcctgtactgtgccaggatcatggactgaccccagaccaggtagtcgcaatcgcgtcaaacggagggggaaagcaagccctggaaaccgtgcaaaggttgttgccggtcctttgtcaagaccacggccttacaccggagcaagtcgtggccattgcaaataataacggtggcaaacaggctcttgagacggttcagagacttctcccagttctctgtcaagcccacgggctgactcccgatcaagttgtagcgattgcgtcgcatgacggagggaaacaagcattggagactgtccaacggctccttcccgtgttgtgtcaagcccacggtttgacgcctgcacaagtggtcgccatcgccagccatgatggcggtaagcaggcgctggaaacagtacagcgcctgctgcctgtactgtgccaggatcatggactgaccccagaccaggtagtcgcaatcgcgtcacatgacgggggaaagcaagccctggaaaccgtgcaaaggttgttgccggtcctttgtcaagaccacggccttacaccggagcaagtcgtggccattgcaaataataacggtggcaaacaggctcttgagacggttcagagacttctcccagttctctgtcaagcccacgggctgacacccgaacaggtggtcgccattgcttctaacatcggaggacggccagccttggagtccatcgtagcccaattgtccaggcccgatcccgcgttggctgcgttaacgaatgaccatctggtggcgttggcatgtcttggtggacgacccgcgctcgatgcagtcaaaaagggtctgcctcatgctcccgcattgatcaaaagaaccaaccggcggattcccgagagaacttcccatcgagtcgcgggatccaactcaaagaaaaggtcactggaggacaacgaaacggaaatcaaagtctccagagacacctggaacactaagaacatgcggtccctggaaccgccacgaagcaagaaacggatacatggcggagactacaaagaccatgacggtgattataaagatcatgacatcgactacaaggatgacgatgacaagtaa

SEQ ID NO: 330 - DNA, 3504 bp, Artificial Sequence
  chemically synthesized
atgacgcgtttcttggacggtattgacaaagctcaggacgaacatgaaaagtaccactctaactggagagctatggcctccgattttaatcttccgccggtggtagcgaaagaaatcgttgccagttgcgacaaatgccaattgaagggagaagccatgcatggtcaagtggattgttcccccggaatatggcaactcgattgcacgcatctggaaggcaaggtcatcctcgtagcggtacatgttgcttctggatatattggcgccgaggttataccggcagaaacgggccaagaaacagcgtactttctcctgaaacttgcgggacgctggcctgtgaaaacgattcataccgacaacggttctaactttaccggagcaacagtacgggccgcatgctggtgggccggtataaagcaggaatttgggattccatacaatccgcaaagtcaaggtgtcgtcgagtctatgaataaggaactcaaaaagataattggtcaggttagagatcaagccgaacatctcaagacggcggtccaaatggcagtttttattcacaactttaagaggaaaggtgggattggtggctattcagcaggggagcgaatagtggacataatagcaaccgacatacagactaaggagttgcaaaagcagatcacaaagattcaaaatctcgaggggggcgggggaagcggcggtggaggtagtggagggggaggatcacccgggggaatcgattacaaggatgacgatgacaagatggcccccaagaagaagaggaaggtgggcattcaccgcggggtacctatggtggacttgaggacactcggttattcgcaacagcaacaggagaaaatcaagcctaaggtcaggagcaccgtcgcgcaacaccacgaggcgcttgtggggcatggcttcactcatgcgcatattgtcgcgctttcacagcaccctgcggcgcttgggacggtggctgtcaaataccaagatatgattgcggccctgcccgaagccacgcacgaggcaattgtaggggtcggtaaacagtggtcgggagcgcgagcacttgaggcgctgctgactgtggcgggtgagcttagggggcctccgctccagctcgacaccgggcagctgctgaagatcgcgaagagagggggagtaacagcggtagaggcagtgcacgcctggcgcaatgcgctcaccggggcccccttgaacctgaccccagaccaggtagtcgcaatcgcgtcacatgacgggggaaagcaagccctggaaaccgtgcaaaggttgttgccggtcctttgtcaagaccacggccttacaccggagcaagtcgtggccattgcatcccacgacggtggcaaacaggctcttgagacggttcagagacttctcccagttctctgtcaagcccacgggctgactcccgatcaagttgtagcgattgcgtccaacggtggagggaaacaagcattggagactgtccaacggctccttcccgtgttgtgtcaagcccacggtttgacgcctgcacaagtggtcgccatcgcctcgaatggcggcggtaagcaggcgctggaaacagtacagcgcctgctgcctgtactgtgccaggatcatggactgaccccagaccaggtagtcgcaatcgcgaacaataatgggggaaagcaagccctggaaaccgtgcaaaggttgttgccggtcctttgtcaagaccacggccttacaccggagcaagtcgtggccattgcaagcaacatcggtggcaaacaggctcttgagacggttcagagacttctcccagttctctgtcaagcccacgggctgactcccgatcaagttgtagcgattgcgtcgaacattggagggaaacaagcattggagactgtccaacggctccttcccgtgttgtgtcaagcccacggtttgacgcctgcacaagtggtcgccatcgccaacaacaacggcggtaagcaggcgctggaaacagtacagcgcctgctgcctgtactgtgccaggatcatggactgaccccagaccaggtagtcgcaatcgcgtcgaacattgggggaaagcaagccctggaaaccgtgcaaaggttgttgccggtcctttgtcaagaccacggccttacaccggagcaagtcgtggccattgcaagcaacatcggtggcaaacaggctcttgagacggttcagagacttctcccagttctctgtcaagcccacgggctgactcccgatcaagttgtagcgattgcgaataacaatggagggaaacaagcattggagactgtccaacggctccttcccgtgttgtgtcaagcccacggtttgacgcctgcacaagtggtcgccatcgcctccaatattggcggtaagcaggcgctggaaacagtacagcgcctgctgcctgtactgtgccaggatcatggactgaccccagaccaggtagtcgcaatcgcgtcaaacggagggggaaagcaagccctggaaaccgtgcaaaggttgttgccggtcctttgtcaagaccacggccttacaccggagcaagtcgtggccattgcaaataataacggtggcaaacaggctcttgagacggttcagagacttctcccagttctctgtcaagcccacgggctgactcccgatcaagttgtagcgattgcgaataacaatggagggaaacaagcattggagactgtccaacggctccttcccgtgttgtgtcaagcccacggtttgacgcctgcacaagtggtcgccatcgcctcgaatggcggcggtaagcaggcgctggaaacagtacagcgcctgctgcctgtactgtgccaggatcatggactgaccccagaccaggtagtcgcaatcgcgaacaataatgggggaaagcaagccctggaaaccgtgcaaaggttgttgccggtcctttgtcaagaccacggccttacaccggagcaagtcgtggccattgcatcccacgacggtggcaaacaggctcttgagacggttcagagacttctcccagttctctgtcaagcccacgggctgacacccgaacaggtggtcgccattgctaataataacggaggacggccagccttggagtccatcgtagcccaattgtccaggcccgatcccgcgttggctgcgttaacgaatgaccatctggtggcgttggcatgtcttggtggacgacccgcgctcgatgcagtcaaaaagggtctgcctcatgctcccgcattgatcaaaagaaccaaccggcggattcccgagagaacttcccatcgagtcgcgggatccaactcaaagaaaaggtcactggaggacaacgaaacggaaatcaaagtctccagagacacctggaacactaagaacatgcggtccctggaaccgccacgaagcaagaaacggatacatggcggagactacaaagaccatgacggtgattataaagatcatgacatcgactacaaggatgacgatgacaagtaa

SEQ ID NO: 331 - DNA, 3606 bp, Artificial Sequence
  chemically synthesized
atgacgcgtttcttggacggtattgacaaagctcaggacgaacatgaaaagtaccactctaactggagagctatggcctccgattttaatcttccgccggtggtagcgaaagaaatcgttgccagttgcgacaaatgccaattgaagggagaagccatgcatggtcaagtggattgttcccccggaatatggcaactcgattgcacgcatctggaaggcaaggtcatcctcgtagcggtacatgttgcttctggatatattggcgccgaggttataccggcagaaacgggccaagaaacagcgtactttctcctgaaacttgcgggacgctggcctgtgaaaacgattcataccgacaacggttctaactttaccggagcaacagtacgggccgcatgctggtgggccggtataaagcaggaatttgggattccatacaatccgcaaagtcaaggtgtcgtcgagtctatgaataaggaactcaaaaagataattggtcaggttagagatcaagccgaacatctcaagacggcggtccaaatggcagtttttattcacaactttaagaggaaaggtgggattggtggctattcagcaggggagcgaatagtggacataatagcaaccgacatacagactaaggagttgcaaaagcagatcacaaagattcaaaatctcgaggggggcgggggaagcggcggtggaggtagtggagggggaggatcacccgggggaatcgattacaaggatgacgatgacaagatggcccccaagaagaagaggaaggtgggcattcaccgcggggtacctatggtggacttgaggacactcggttattcgcaacagcaacaggagaaaatcaagcctaaggtcaggagcaccgtcgcgcaacaccacgaggcgcttgtggggcatggcttcactcatgcgcatattgtcgcgctttcacagcaccctgcggcgcttgggacggtggctgtcaaataccaagatatgattgcggccctgcccgaagccacgcacgaggcaattgtaggggtcggtaaacagtggtcgggagcgcgagcacttgaggcgctgctgactgtggcgggtgagcttagggggcctccgctccagctcgacaccgggcagctgctgaagatcgcgaagagagggggagtaacagcggtagaggcagtgcacgcctggcgcaatgcgctcaccggggcccccttgaacctgaccccagaccaggtagtcgcaatcgcgaacaataatgggggaaagcaagccctggaaaccgtgcaaaggttgttgccggtcctttgtcaagaccacggccttacaccggagcaagtcgtggccattgcaagcaacatcggtggcaaacaggctcttgagacggttcagagacttctcccagttctctgtcaagcccacgggctgactcccgatcaagttgtagcgattgcgtcgaacattggagggaaacaagcattggagactgtccaacggctccttcccgtgttgtgtcaagcccacggtttgacgcctgcacaagtggtcgccatcgccaacaacaacggcggtaagcaggcgctggaaacagtacagcgcctgctgcctgtactgtgccaggatcatggactgaccccagaccaggtagtcgcaatcgcgtcaaacggagggggaaagcaagccctggaaaccgtgcaaaggttgttgccggtcctttgtcaagaccacggccttacaccggagcaagtcgtggccattgcaagcaatgggggtggcaaacaggctcttgagacggttcagagacttctcccagttctctgtcaagcccacgggctgactcccgatcaagttgtagcgattgcgtcgcatgacggagggaaacaagcattggagactgtccaacggctccttcccgtgttgtgtcaagcccacggtttgacgcctgcacaagtggtcgccatcgccaacaacaacggcggtaagcaggcgctggaaacagtacagcgcctgctgcctgtactgtgccaggatcatggactgaccccagaccaggtagtcgcaatcgcgtcgaacattgggggaaagcaagccctggaaaccgtgcaaaggttgttgccggtcctttgtcaagaccacggccttacaccggagcaagtcgtggccattgcaaataataacggtggcaaacaggctcttgagacggttcagagacttctcccagttctctgtcaagcccacgggctgactcccgatcaagttgtagcgattgcgaataacaatggagggaaacaagcattggagactgtccaacggctccttcccgtgttgtgtcaagcccacggtttgacgcctgcacaagtggtcgccatcgccaacaacaacggcggtaagcaggcgctggaaacagtacagcgcctgctgcctgtactgtgccaggatcatggactgaccccagaccaggtagtcgcaatcgcgtcacatgacgggggaaagcaagccctggaaaccgtgcaaaggttgttgccggtcctttgtcaagaccacggccttacaccggagcaagtcgtggccattgcaaataataacggtggcaaacaggctcttgagacggttcagagacttctcccagttctctgtcaagcccacgggctgactcccgatcaagttgtagcgattgcgtcgaacattggagggaaacaagcattggagactgtccaacggctccttcccgtgttgtgtcaagcccacggtttgacgcctgcacaagtggtcgccatcgccagccatgatggcggtaagcaggcgctggaaacagtacagcgcctgctgcctgtactgtgccaggatcatggactgaccccagaccaggtagtcgcaatcgcgtcgaacattgggggaaagcaagccctggaaaccgtgcaaaggttgttgccggtcctttgtcaagaccacggccttacaccggagcaagtcgtggccattgcatcccacgacggtggcaaacaggctcttgagacggttcagagacttctcccagttctctgtcaagcccacgggctgactcccgatcaagttgtagcgattgcgtcgcatgacggagggaaacaagcattggagactgtccaacggctccttcccgtgttgtgtcaagcccacggtctgacacccgaacaggtggtcgccattgcttcccacgacggaggacggccagccttggagtccatcgtagcccaattgtccaggcccgatcccgcgttggctgcgttaacgaatgaccatctggtggcgttggcatgtcttggtggacgacccgcgctcgatgcagtcaaaaagggtctgcctcatgctcccgcattgatcaaaagaaccaaccggcggattcccgagagaacttcccatcgagtcgcgggatccaactcaaagaaaaggtcactggaggacaacgaaacggaaatcaaagtctccagagacacctggaacactaagaacatgcggtccctggaaccgccacgaagcaagaaacggatacatggcggagactacaaagaccatgacggtgattataaagatcatgacatcgactacaaggatgacgatgacaagtaa

SEQ ID NO: 332 - DNA, 807 bp, Artificial Sequence; identical to SEQ ID NO: 300
  chemically synthesized

SEQ ID NO: 333 - DNA, 1754 bp, Artificial Sequence
  chemically synthesized
ctggggcgtcccccatgagcagggccggggaggggccggtagacccaggctcgtctcccaggctgcagcccacctgctcccctcccccgcctgccggctccggtcctcggcgtctgccctgtccccggggaccgcttttcgcggctcaagcgtgttcctgccctgagccggctctcgccccgtctcccgggcccgccgcgctctccccgcgccgtctccgtcccggtccctccctcccgccgcctccctgccctgccccccgccccgcccccgcccgcggcgcgtttctcccccgcctcccgcgtccgtctttgcagcccgcgcctcccgcatcgcctcgcgtccccgtggcgcccgcccgcgcgcgtccgcgccccgccccctcccgcgcggttccgcattggcgtgctgcagggcgcggtgcactgcgccgccaccgtcaataggtggaccccctcccggagataaaaccgccggcgccggcgccgccagtccctctggctgagacctcggctccgggtaaggacgctcggcccccgggcctccgcccccgcccccgtcttccgaagagggacccccggggccggtcctggggggcagagggtggccgggccccgcacccgcccccgcgcgcgcccggagtccggcttccgggggtccccgcgtcggccgggctgggcccggggtggggggcggcgcggggcggcggggccgggtcctgggcggcgatcgccccgtagccgtgaccttggggccgcggggaccctgcgggccgggggctgatgggggtcgggcttcggggcgctgggccagaggacgctgagggaggtggtgagatctgggggccctggcctccccacccccacccgtgttcccaccccagggtggcttctgtcctctttccctcccccagccacctgtccgcgaggagcagcgtgggtttctccactgacctctgtgatgggacagggctgtgacccagggtcctgagtcacagggagggggggagggagggtgccccctatacccccacggggccgagggcatctccacctggcacttgctgggctcggcagggccgggtcctccttcctcaggctggaacagggacccccacctcccggccgctgtctgtccctgtgagagtccgggaggggggtgcctagagctattctgggttcctaatctgggcagcgcatctccgtcggggctctggcccagcctgccgggcagggatgaggggaagatggcgccgtccctgcctgaggaggggagtggggagcagtggccatctctccccggtggcagcgggtgggggtggggcgccgtgtccctggccctgccgccggggaggggagtgcgcgtgcaggacagggccctggagcgctgggcaggtgactcatcacccggctctgctggtcacggacgtacccagcctggcgctgcgtggtctctccaaatggtggctaaccccttcccaaggagcagcccgcgggctccaacgcccagttatttacagcagatggggctgtttgggctcaagtgtggggtgggggcagtgcacagcctctgcttgccctggccaggcccagctgtgggtgggggcccttccctccccaccaaacatgggggcttggtttgtgggcagggatgcctgtccagcctgtgccaggacagtctctgctggtgtctccccctggggctccccatcaccggtctccccaccaccactggccccacagaatcactgcagc

SEQ ID NO: 334 - DNA, 516 bp, Artificial Sequence
  chemically synthesized
ctggggcgtcccccatgagcagggccggggaggggccggtagacccaggctcgtctcccaggctgcagcccacctgctcccctcccccgcctgccggctccggtcctcggcgtctgccctgtccccggggaccgcttttcgcggctcaagcgtgttcctgccctgagccggctctcgccccgtctcccgggcccgccgcgctctccccgcgccgtctccgtcccggtccctccctcccgccgcctccctgccctgccccccgccccgcccccgcccgcggcgcgtttctcccccgcctcccgcgtccgtctttgcagcccgcgcctcccgcatcgcctcgcgtccccgtggcgcccgcccgcgcgcgtccgcgccccgccccctcccgcgcggttccgcattggcgtgctgcagggcgcggtgcactgcgccgccaccgtcaataggtggaccccctcccggagataaaaccgccggcgccggcgccgccagtccctctggctgagacctcggctc

SEQ ID NO: 335 - DNA, 244 bp, Artificial Sequence
  chemically synthesized
gcccgcggcgcgtttctcccccgcctcccgcgtccgtctttgcagcccgcgcctcccgcatcgcctcgcgtccccgtggcgcccgcccgcgcgcgtccgcgccccgccccctcccgcgcggttccgcattggcgtgctgcagggcgcggtgcactgcgccgccaccgtcaataggtggaccccctcccggagataaaaccgccggcgccggcgccgccagtccctctggctgagacctcggctc

SEQ ID NO: 336 - DNA, 157 bp, Artificial Sequence
  chemically synthesized
ttcactgataaagtggagaaccgcttcaccaaaagctgtcccttaggggattagaacttgagtgaaggtgggctgcttgcatcagcctaatgtcgagaagtgctttcttcggaaagtaaccctcgaaacaaattcatttttcctctccaattctgca

SEQ ID NO: 337 - DNA, 157 bp, Artificial Sequence
  chemically synthesized
ttcactgataaagtggagaaccgcttcaccaaaagctgtcccttaggggattagaacttgagtgaaggtgggctgcttgcatcagcctaatgtcgagaagtgctttcttcggaaagtaaccctcgaaacaaattcatatttcctctccaattctgca

SEQ ID NO: 338 - DNA, 157 bp, Artificial Sequence
  chemically synthesized
ttcactgataaagtggagaaccgcttcaccaaaagctgtcccttaggggattagaacttgagtgaaggtgggctgcttgcatcagcctaatgtcgagaagtgctttcttcggaaagtaaccctcgaaacaaattcattcttcctctccaattctgca

SEQ ID NO: 339 - DNA, 157 bp, Artificial Sequence
  chemically synthesized
ttcactgataaagtggagaaccgcttcaccaaaagctgtcccttaggggattagaacttgagtgaaggtgggctgcttgcatcagcctaatgtcgagaagtgctttcttcggaaagtaaccctcgaaacaaattcatttctcctctccaattctgca

SEQ ID NO: 340 - DNA, 35 bp, Artificial Sequence
  chemically synthesized
tgcagaacccgaatagacgaatgaaggaatgcaac

SEQ ID NO: 341 - DNA, 35 bp, Artificial Sequence
  chemically synthesized
tgcagaacccgaatagacgtatgaaggaatgcaac

SEQ ID NO: 342 - DNA, 17 bp, Artificial Sequence
  chemically synthesized
gaatgaaggaatgcaac

SEQ ID NO: 343 - DNA, 10 bp, Artificial Sequence
  chemically synthesized
ggaatgcaac

SEQ ID NO: 344 - DNA, 205 bp, Artificial Sequence
  chemically synthesized
gggcttcactgataaagtggagaaccgcttcaccaaaagctgtcccttaggggattagaacttgagtgaaggtgggctgcttgcatcagcctaatgtcgagaagtgctttcttcggaaagtaaccctcgaaacaaattcatttttcctctccaattctgcacaagaaagttgcagaacccgaatagacgaatgaaggaatgcaac

SEQ ID NO: 345 - DNA, 205 bp, Artificial Sequence
  chemically synthesized
gggcttcactgataaagtggagaaccgcttcaccaaaagctgtcccttaggggattagaacttgagtgaaggtgggctgcttgcatcagcctaatgtcgagaagtgctttcttcggaaagtaaccctcgaaacaaattcatatttcctctccaattctgcacaagaaagttgcagaacccgaatagacgtatgaaggaatgcaac

SEQ ID NO: 346 - DNA, 205 bp, Artificial Sequence
  chemically synthesized
gggcttcactgataaagtggagaaccgcttcaccaaaagctgtcccttaggggattagaacttgagtgaaggtgggctgcttgcatcagcctaatgtcgagaagtgctttcttcggaaagtaaccctcgaaacaaattcattcttcctctccaattctgcacaagaaagttgcagaacccgaatagacgaatgaaggaatgcaac

SEQ ID NO: 347 - DNA, 205 bp, Artificial Sequence
  chemically synthesized
gggcttcactgataaagtggagaaccgcttcaccaaaagctgtcccttaggggattagaacttgagtgaaggtgggctgcttgcatcagcctaatgtcgagaagtgctttcttcggaaagtaaccctcgaaacaaattcatttgtcctctccaattctgcacaagaaagttgcagaacccgaatagacgaatgaaggaatgcaac

SEQ ID NO: 348 - DNA, 164 bp, Artificial Sequence
  chemically synthesized
gggcttcactgataaagtggagaaccgcttcaccaaaagctgtcccttaggggattagaacttgagtgaaggtgggctgcttgcatcagcctaatgtcgagaagtgctttcttcggaaagtaaccctcgaaacaaattcatttgaaagaatgaaggaatgcaac

SEQ ID NO: 349 - DNA, 150 bp, Artificial Sequence
  chemically synthesized
gggcttcactgataaagtggagaaccgcttcaccaaaagctgtcccttaggggattagaacttgagtgaaggtgggctgcttgcatcagcctaatgtcgagaagtgctttcttcggaaagtaaccctcgaaacaaagaaaggaatgcaac

SEQ ID NO: 350 - DNA, 233 bp, Artificial Sequence
  chemically synthesized
gggcttcactgataaagtggagaaccgcttcaccaaaagctgtcccttaggggattagaacttgagtgaaggtgggctgcttgcatcagcctaatgtcgagaagtgctttcttcggaaagtaaccctcgaaacaaattcatttttcctctccaattctgcacaagaaagttgcagaacccgaatagacgaatgaaggaatgcaacggggtgaccgccggagcgcgtttttttt

SEQ ID NO: 351 - DNA, 233 bp, Artificial Sequence
  chemically synthesized
gggcttcactgataaagtggagaaccgcttcaccaaaagctgtcccttaggggattagaacttgagtgaaggtgggctgcttgcatcagcctaatgtcgagaagtgctttcttcggaaagtaaccctcgaaacaaattcatatttcctctccaattctgcacaagaaagttgcagaacccgaatagacgtatgaaggaatgcaacggggtgaccgccggagcgcgtttttttt

SEQ ID NO: 352 - DNA, 233 bp, Artificial Sequence
  chemically synthesized
gggcttcactgataaagtggagaaccgcttcaccaaaagctgtcccttaggggattagaacttgagtgaaggtgggctgcttgcatcagcctaatgtcgagaagtgctttcttcggaaagtaaccctcgaaacaaattcattcttcctctccaattctgcacaagaaagttgcagaacccgaatagacgaatgaaggaatgcaacggggtgaccgccggagcgcgtttttttt

SEQ ID NO: 353 - DNA, 233 bp, Artificial Sequence
  chemically synthesized
gggcttcactgataaagtggagaaccgcttcaccaaaagctgtcccttaggggattagaacttgagtgaaggtgggctgcttgcatcagcctaatgtcgagaagtgctttcttcggaaagtaaccctcgaaacaaattcatttgtcctctccaattctgcacaagaaagttgcagaacccgaatagacgaatgaaggaatgcaacggggtgaccgccggagcgcgtttttttt

SEQ ID NO: 354 - DNA, 192 bp, Artificial Sequence
  chemically synthesized
gggcttcactgataaagtggagaaccgcttcaccaaaagctgtcccttaggggattagaacttgagtgaaggtgggctgcttgcatcagcctaatgtcgagaagtgctttcttcggaaagtaaccctcgaaacaaattcatttgaaagaatgaaggaatgcaacggggtgaccgccggagcgcgtttttttt

SEQ ID NO: 355 - DNA, 178 bp, Artificial Sequence
  chemically synthesized
gggcttcactgataaagtggagaaccgcttcaccaaaagctgtcccttaggggattagaacttgagtgaaggtgggctgcttgcatcagcctaatgtcgagaagtgctttcttcggaaagtaaccctcgaaacaaagaaaggaatgcaacggggtgaccgccggagcgcgtttttttt

SEQ ID NO: 356 - DNA, 1792 bp, Artificial Sequence
  chemically synthesized
atggagcaaaagccaccgtttgggggtgaccgccggagcgcgaaggtccggcggaggcagcggaggcggaggcagcggcgccaccaacttcagcctgctgaagcaggccggcgacgtggaggagaaccctggacctctcgaggaagacgccaaaaacataaagaaaggcccggcgccattctatccgctggaagatggaaccgctggagagcaactgcataaggctatgaagagatacgccctggttcctggaacaattgcttttacagatgcacatatcgaggtggacatcacttacgctgagtacttcgaaatgtccgttcggttggcagaagctatgaaacgatatgggctgaatacaaatcacagaatcgtcgtatgcagtgaaaactctcttcaattctttatgccggtgttgggcgcgttatttatcggagttgcagttgcgcccgcgaacgacatttataatgaacgtgaattgctcaacagtatgggcatttcgcagcctaccgtggtgttcgtttccaaaaaggggttgcaaaaaattttgaacgtgcaaaaaaagctcccaatcatccaaaaaattattatcatggattctaaaacggattaccagggatttcagtcgatgtacacgttcgtcacatctcatctacctcccggttttaatgaatacgattttgtgccagagtccttcgatagggacaagacaattgcactgatcatgaactcctctggatctactggtctgcctaaaggtgtcgctctgcctcatagaactgcctgcgtgagattctcgcatgccagagatcctatttttggcaatcaaatcattccggatactgcgattttaagtgttgttccattccatcacggttttggaatgtttactacactcggatatttgatatgtggatttcgagtcgtcttaatgtatagatttgaagaagagctgtttctgaggagccttcaggattacaagattcaaagtgcgctgctggtgccaaccctattctccttcttcgccaaaagcactctgattgacaaatacgatttatctaatttacacgaaattgcttctggtggcgctcccctctctaaggaagtcggggaagcggttgccaagaggttccatctgccaggtatcaggcaaggatatgggctcactgagactacatcagctattctgattacacccgagggggatgataaaccgggcgcggtcggtaaagttgttccattttttgaagcgaaggttgtggatctggataccgggaaaacgctgggcgttaatcaaagaggcgaactgtgtgtgagaggtcctatgattatgtccggttatgtaaacaatccggaagcgaccaacgccttgattgacaaggatggatggctacattctggagacatagcttactgggacgaagacgaacacttcttcatcgttgaccgcctgaagtctctgattaagtacaaaggctatcaggtggctcccgctgaattggaatccatcttgctccaacaccccaacatcttcgacgcaggtgtcgcaggtcttcccgacgatgacgccggtgaacttcccgccgccgttgttgttttggagcacggaaagacgatgacggaaaaagagatcgtggattacgtcgccagtcaagtaacaaccgcgaaaaagttgcgcggaggagttgtgtttgtggacgaagtaccgaaaggtcttaccggaaaactcgacgcaagaaaaatcagagagatcctcataaaggccaagaagggcggaaagatcgccgtgtaa

SEQ ID NO: 357 - protein, 209 aa, Artificial Sequence
  chemically synthesized
WTLGRRAVAGLLASPSPAQAQTLTRVPRPAELAPLCGRRGLRTDIDATCTPRRASSNQRGLNQIWNVKKQSVYLMNLRKSGTLGHPGSLDETTYERLAEETLDSLAEFFEDLADKPYTFEDYDVSFGSGVLTVKLGGDLGTYVINKQTPNKQIWLSSPSSGPKRYDWTGKNWVYSHDGVSLHELLAAELTKALKTKLDLSSLAYSGKDA

SEQ ID NO: 358 - DNA, 636 bp, Artificial Sequence
  chemically synthesized
atgtggactctcgggcgccgcgcagtagccggcctcctggcgtcacccagcccggcccaggcccagaccctcacccgggtcccgcggccggcagagttggccccactctgcggccgccgtggcctgcgcaccgacatcgatgcgacctgcacgccccgccgcgcaagttcgaaccaacgtggcctcaaccagatttggaatgtcaaaaagcagagtgtctatttgatgaatttgaggaaatctggaactttgggccacccaggctctctagatgagaccacctatgaaagactagcagaggaaacgctggactctttagcagagttttttgaagaccttgcagacaagccatacacgtttgaggactatgatgtctcctttgggagtggtgtcttaactgtcaaactgggtggagatctaggaacctatgtgatcaacaagcagacgccaaacaagcaaatctggctatcttctccatccagtggacctaagcgttatgactggactgggaaaaactgggtgtactcccacgacggcgtgtccctccatgagctgctggccgcagagctcactaaagccttaaaaaccaaactggacttgtcttccttggcctattccggaaaagatgcttaatag

SEQ ID NO: 359 - DNA, 3589 bp, Artificial Sequence
  chemically synthesized
gggtctctctggttagaccagatctgagcctgggagctctctggctaactagggaacccactgcttaagcctcaataaagcttgccttgagtgcttcaagtagtgtgtgcccgtctgttgtgtgactctggtaactagagatccctcagacccttttagtcagtgtggaaaatctctagcagtggcgcccgaacagggacttgaaagcgaaagggaaaccagaggagctctctcgacgcaggactcggcttgctgaagcgcgcacggcaagaggcgaggggcggcgactggtgagtacgccaaaaattttgactagcggaggctagaaggagagagatgggtgcgagagcgtcagtattaagcgggggagaattagatcgcgatgggaaaaaattcggttaaggccagggggaaagaaaaaatataaattaaaacatatagtatgggcaagcagggagctagaacgattcgcagttaatcctggcctgttagaaacatcagaaggctgtagacaaatactgggacagctacaaccatcccttcagacaggatcagaagaacttagatcattatataatacagtagcaaccctctattgtgtgcatcaaaggatagagataaaagacaccaaggaagctttagacaagatagaggaagagcaaaacaaaagtaagaccaccgcacagcaagcggccgctgatcttcagacctggaggaggagatatgagggacaattggagaagtgaattatataaatataaagtagtaaaaattgaaccattaggagtagcacccaccaaggcaaagagaagagtggtgcagagagaaaaaagagcagtgggaataggagctttgttccttgggttcttgggagcagcaggaagcactatgggcgcagcgtcaatgacgctgacggtacaggccagacaattattgtctggtatagtgcagcagcagaacaatttgctgagggctattgaggcgcaacagcatctgttgcaactcacagtctggggcatcaagcagctccaggcaagaatcctggctgtggaaagatacctaaaggatcaacagctcctggggatttggggttgctctggaaaactcatttgcaccactgctgtgccttggaatgctagttggagtaataaatctctggaacagatttggaatcacacgacctggatggagtgggacagagaaattaacaattacacaagcttaatacactccttaattgaagaatcgcaaaaccagcaagaaaagaatgaacaagaattattggaattagataaatgggcaagtttgtggaattggtttaacataacaaattggctgtggtatataaaattattcataatgatagtaggaggcttggtaggtttaagaatagtttttgctgtactttctatagtgaatagagttaggcagggatattcaccattatcgtttcagacccacctcccaaccccgaggggacccgacaggcccgaaggaatagaagaagaaggtggagagagagacagagacagatccattcgattagtgaacggatcggcactgcgtgcgccaattctgcagacaaatggcagtattcatccacaattttaaaagaaaaggggggattggggggtacagtgcaggggaaagaatagtagacataatagcaacagacatacaaactaaagaattacaaaaacaaattacaaaaattcaaaattttcgggtttattacagggacagcagagatccagtttggttaattaaggtaccaagaattcgcccgcggcgcgtttctcccccgcctcccgcgtccgtctttgcagcccgcgcctcccgcatcgcctcgcgtccccgtggcgcccgcccgcgcgcgtccgcgccccgccccctcccgcgcggttccgcattggcgtgctgcagggcgcggtgcactgcgccgccaccgtcaataggtggaccccctcccagagataaaaccgccggcgccggcgccgccagtccctctggctgagacctcggctcctcgagcgccaccatgtggactctcgggcgccgcgcagtagccggcctcctggcgtcacccagcccggcccaggcccagaccctcacccgggtcccgcggccggcagagttggccccactctgcggccgccgtggcctgcgcaccgacatcgatgcgacctgcacgccccgccgcgcaagttcgaaccaacgtggcctcaaccagatttggaatgtcaaaaagcagagtgtctatttgatgaatttgaggaaatctggaactttgggccacccaggctctctagatgagaccacctatgaaagactagcagaggaaacgctggactctttagcagagttttttgaagaccttgcagacaagccatacacgtttgaggactatgatgtctcctttgggagtggtgtcttaactgtcaaactgggtggagatctaggaacctatgtgatcaacaagcagacgccaaacaagcaaatctggctatcttctccatccagtggacctaagcgttatgactggactgggaaaaactgggtgtactcccacgacggcgtgtccctccatgagctgctggccgcagagctcactaaagccttaaaaaccaaactggacttgtcttccttggcctattccggaaaagatgcttaatagtctagaacgcgttaagtcgacaatcaacctctggattacaaaatttgtgaaagattgactggtattcttaactatgttgctccttttacgctatgtggatacgctgctttaatgcctttgtatcatgctattgcttcccgtatggctttcattttctcctccttgtataaatcctggttgctgtctctttatgaggagttgtggcccgttgtcaggcaacgtggcgtggtgtgcactgtgtttgctgacgcaacccccactggttggggcattgccaccacctgtcagctcctttccgggactttcgctttccccctccctattgccacggcggaactcatcgccgcctgccttgcccgctgctggacaggggctcggctgttgggcactgacaattccgtggtgttgtcggggaaatcatcgtcctttccttggctgctcgcctgtgttgccacctggattctgcgcgggacgtccttctgctacgtcccttcggccctcaatccagcggaccttccttcccgcggcctgctgccggctctgcggcctcttccgcgtcttcgccttcgccctcagacgagtcggatctccctttgggccgcctccccgcgtcgactttaagaccaatgacttacaaggcagctgtagatcttagccactttttaaaagaaaaggggggactggaagggctaattcactcccaacgaagacaagatctgctttttgcttgtactgggtctctctggttagaccagatctgagcctgggagctctctggctaactagggaacccactgcttaagcctcaataaagcttgccttgagtgcttcaagtagtgtgtgcccgtctgttgtgtgactctggtaactagagatccctcagacccttttagtcagtgtggaaaatctctagca

SEQ ID NO: 360 - DNA, 2044 bp, Artificial Sequence
  chemically synthesized
cctgcaggcagctgcgcgctcgctcgctcactgaggccgcccgggcaaagcccgggcgtcgggcgacctttggtcgcccggcctcagtgagcgagcgagcgcgcagagagggagtggccaactccatcactaggggttcctgcggccgcggtaccaagaattcgcccgcggcgcgtttctcccccgcctcccgcgtccgtctttgcagcccgcgcctcccgcatcgcctcgcgtccccgtggcgcccgcccgcgcgcgtccgcgccccgccccctcccgcgcggttccgcattggcgtgctgcagggcgcggtgcactgcgccgccaccgtcaataggtggaccccctcccagagataaaaccgccggcgccggcgccgccagtccctctggctgagacctcggctcctcgagcgccaccatgtggactctcgggcgccgcgcagtagccggcctcctggcgtcacccagcccggcccaggcccagaccctcacccgggtcccgcggccggcagagttggccccactctgcggccgccgtggcctgcgcaccgacatcgatgcgacctgcacgccccgccgcgcaagttcgaaccaacgtggcctcaaccagatttggaatgtcaaaaagcagagtgtctatttgatgaatttgaggaaatctggaactttgggccacccaggctctctagatgagaccacctatgaaagactagcagaggaaacgctggactctttagcagagttttttgaagaccttgcagacaagccatacacgtttgaggactatgatgtctcctttgggagtggtgtcttaactgtcaaactgggtggagatctaggaacctatgtgatcaacaagcagacgccaaacaagcaaatctggctatcttctccatccagtggacctaagcgttatgactggactgggaaaaactgggtgtactcccacgacggcgtgtccctccatgagctgctggccgcagagctcactaaagccttaaaaaccaaactggacttgtcttccttggcctattccggaaaagatgcttaatagtctagaacgcgttaagtcgacaatcaacctctggattacaaaatttgtgaaagattgactggtattcttaactatgttgctccttttacgctatgtggatacgctgctttaatgcctttgtatcatgctattgcttcccgtatggctttcattttctcctccttgtataaatcctggttgctgtctctttatgaggagttgtggcccgttgtcaggcaacgtggcgtggtgtgcactgtgtttgctgacgcaacccccactggttggggcattgccaccacctgtcagctcctttccgggactttcgctttccccctccctattgccacggcggaactcatcgccgcctgccttgcccgctgctggacaggggctcggctgttgggcactgacaattccgtggtgttgtcggggaaatcatcgtcctttccttggctgctcgcctgtgttgccacctggattctgcgcgggacgtccttctgctacgtcccttcggccctcaatccagcggaccttccttcccgcggcctgctgccggctctgcggcctcttccgcgtcttcgccttcgccctcagacgagtcggatctccctttgggccgcctccccgcgatatctaactagttaagctagaaattcctagagctcgctgatcagcctcgactgtgccttctagttgccagccatctgttgtttgcccctcccccgtgccttccttgaccctggaaggtgccactcccactgtcctttcctaataaaatgaggaaattgcatcgcattgtctgagtaggtgtcattctattctggggggtggggtggggcaggacagcaagggggaggattgggaagagaatagcaggcatgctggggagctagaggccgcccactccctctctgcgcgctcgctcgctcactgaggccgggcgaccaaaggtcgcccgacgcccgggcggcctcagtgagcgagcgagcgcgcagctgcctgcagg

SEQ ID NO: 361 - protein, 34 aa, Artificial Sequence
  chemically synthesized
KKRNSNEYRLVPTKWQDYKKPGPNQKYTSDGKKR

SEQ ID NO: 362 - protein, 36 aa, Artificial Sequence
  chemically synthesized
KKRLHLIIADAELETVPPEILDHPAIVNYAKRRKKR

SEQ ID NO: 363 - protein, 29 aa, Artificial Sequence
  chemically synthesized
KKRIEELEIELGLRAPPKKEKKGKKSKKR

SEQ ID NO: 364 - protein, 26 aa, Artificial Sequence
  chemically synthesized
KKRALKYRLNPKLLKENNKKDVNKKR

SEQ ID NO: 365 - protein, 26 aa, Artificial Sequence
  chemically synthesized
KKRNFLESIEISINLKDVDLSDPKKR

SEQ ID NO: 366 - protein, 30 aa, Artificial Sequence
  chemically synthesized
KKRSEKSMALRLAGELSEAAEGRGGAMKKR

SEQ ID NO: 367 - protein, 30 aa, Artificial Sequence
  chemically synthesized
KKRFKLTGTGKIKRKHAFKSHILTKKSKKR

SEQ ID NO: 368 - protein, 30 aa, Artificial Sequence
  chemically synthesized
KKRNEHTMEERLAGELADAVNGRGTAVKKR

SEQ ID NO: 369 - protein, 30 aa, Artificial Sequence; identical to SEQ ID NO: 366
  chemically synthesized

SEQ ID NO: 370 - protein, 30 aa, Artificial Sequence
  chemically synthesized
KKRGEKSMSLRLANELMEATEGRGGAMKKR

SEQ ID NO: 371 - protein, 46 aa, Artificial Sequence
  chemically synthesized
KKRLATHNAGKGAKYTRYRLPVSLLYYEVFDSKEAAMSAEALFKKR

SEQ ID NO: 372 - protein, 30 aa, Artificial Sequence; identical to SEQ ID NO: 366
  chemically synthesized

SEQ ID NO: 373 - protein, 30 aa, Artificial Sequence; identical to SEQ ID NO: 366
  chemically synthesized

SEQ ID NO: 374 - protein, 30 aa, Artificial Sequence; identical to SEQ ID NO: 366
  chemically synthesized

SEQ ID NO: 375 - protein, 30 aa, Artificial Sequence; identical to SEQ ID NO: 366
  chemically synthesized

SEQ ID NO: 376 - protein, 30 aa, Artificial Sequence; identical to SEQ ID NO: 366
  chemically synthesized

SEQ ID NO: 377 - protein, 30 aa, Artificial Sequence
  chemically synthesized
KKRGEKSMAQRLANELLEAAEGRGGAMKKR

SEQ ID NO: 378 - protein, 30 aa, Artificial Sequence
  chemically synthesized
KKRFKVTGSGKIKRKHAFKSHILTKKSKKR

SEQ ID NO: 379 - protein, 44 aa, Artificial Sequence
  chemically synthesized
KKRKKYLKAAKGYRGALSRRYKLAKQMYVRSKWYSYVGRKLKKR

SEQ ID NO: 380 - protein, 30 aa, Artificial Sequence; identical to SEQ ID NO: 378
  chemically synthesized

SEQ ID NO: 381 - protein, 44 aa, Artificial Sequence
  chemically synthesized
KKRKKIMKAVKGYRGALSRRYRLAKQAYIKAKKHAYVGRKLKKR

SEQ ID NO: 382 - protein, 32 aa, Artificial Sequence
  chemically synthesized
KKRGYQTHGIRPRLAKKKTVMSKIARKQGKKR

SEQ ID NO: 383 - protein, 45 aa, Artificial Sequence
  chemically synthesized
KKRREKFLKSAKGYRGAIKRRYRLAKQHYYRAKWYAYAGRKLKKR

SEQ ID NO: 384 - protein, 37 aa, Artificial Sequence
  chemically synthesized
KKRIGLIFGGYSNEHEVSISSAKTVFQAFNSEINKKR

SEQ ID NO: 385 - protein, 30 aa, Artificial Sequence; identical to SEQ ID NO: 366
  chemically synthesized

SEQ ID NO: 386 - protein, 30 aa, Artificial Sequence
  chemically synthesized
KKRGEKSMDLRLAGELIDASEGRGAAMKKR

SEQ ID NO: 387 - protein, 46 aa, Artificial Sequence
  chemically synthesized
KKRFSFHALHLRLSPRLLKSEKAQRHTKEYTARLYRAFMRSVEKKR

SEQ ID NO: 388 - protein, 30 aa, Artificial Sequence
  chemically synthesized
KKRNEKTMEERLAKEILDASQGTGAAVKKR

SEQ ID NO: 389 - protein, 46 aa, Artificial Sequence
  chemically synthesized
KKRAMELGIDVITPKNINDEEVFDLLDKLNPDFIVVVAYGQLIKKR

SEQ ID NO: 390 - protein, 30 aa, Artificial Sequence; identical to SEQ ID NO: 366
  chemically synthesized

SEQ ID NO: 391 - protein, 44 aa, Artificial Sequence
  chemically synthesized
KKRKKYLKAAKGYRGALSRRYKLAKQMYVRSKWYSYVGRKQKKR

SEQ ID NO: 392 - protein, 42 aa, Artificial Sequence
  chemically synthesized
KKRRAILEAASGYRGQRSRLYRKAKEQVTHSLVYNYNDRKKR

SEQ ID NO: 393 - protein, 30 aa, Artificial Sequence; identical to SEQ ID NO: 377
  chemically synthesized

SEQ ID NO: 394 - protein, 30 aa, Artificial Sequence; identical to SEQ ID NO: 366
  chemically synthesized

SEQ ID NO: 395 - protein, 30 aa, Artificial Sequence; identical to SEQ ID NO: 366
  chemically synthesized

SEQ ID NO: 396 - protein, 30 aa, Artificial Sequence; identical to SEQ ID NO: 366
  chemically synthesized

SEQ ID NO: 397 - protein, 30 aa, Artificial Sequence
  chemically synthesized
KKRSEKSMALRLAGELLEASEGRGGAMKKR

SEQ ID NO: 398 - protein, 29 aa, Artificial Sequence
  chemically synthesized
KKRMKSIGTVEVPQEAFLAILKTDTSKKR

SEQ ID NO: 399 - protein, 30 aa, Artificial Sequence
  chemically synthesized
KKRSEKSMALRLAGELLEAAEGRGGAMKKR

SEQ ID NO: 400 - protein, 30 aa, Artificial Sequence; identical to SEQ ID NO: 366
  chemically synthesized

SEQ ID NO: 401 - protein, 42 aa, Artificial Sequence
  chemically synthesized
KKRILNKAKGYWGSRGTILTVAKHAVDKAEQYAYRDRRVKKR

SEQ ID NO: 402 - protein, 44 aa, Artificial Sequence
  chemically synthesized
KKRRKILKAVKGYHGALSRRYRLAKQAYIKAKKHAYVGRKLKKR

SEQ ID NO: 403 - protein, 26 aa, Artificial Sequence
  chemically synthesized
KKRGIGVKVNNGILWLLELQPEGKKR

SEQ ID NO: 404 - protein, 44 aa, Artificial Sequence
  chemically synthesized
KKRKKFLKEAKGYRGALSRRYKLAKQMYIRSKWYSYVGRKIKKR

SEQ ID NO: 405 - protein, 32 aa, Artificial Sequence
  chemically synthesized
KKRFSVTGSGKVRRLKAYKSHILTKMSGKKKR

SEQ ID NO: 406 - protein, 43 aa, Artificial Sequence
  chemically synthesized
KKRKYLKAAKGYRGALSRRYRLAKQYYIRSGVYAYVGRKQKKR

SEQ ID NO: 407 - protein, 42 aa, Artificial Sequence
  chemically synthesized
KKRRAILEQASGYRGQRSRLYRKAKEQVTHSLVYNYNDRKKR

SEQ ID NO: 408 - protein, 46 aa, Artificial Sequence; identical to SEQ ID NO: 371
  chemically synthesized

SEQ ID NO: 409 - protein, 46 aa, Artificial Sequence; identical to SEQ ID NO: 371
  chemically synthesized

SEQ ID NO: 410 - protein, 27 aa, Artificial Sequence
  chemically synthesized
KKRIPNTVFIFLVPPEKKALYDRLKKR

SEQ ID NO: 411 - protein, 46 aa, Artificial Sequence; identical to SEQ ID NO: 371
  chemically synthesized

SEQ ID NO: 412 - protein, 40 aa, Artificial Sequence
  chemically synthesized
KKRILDTLFTRSPKNQQDFIEHTDDKKSIVNFFVGAFKKR

SEQ ID NO: 413 - protein, 26 aa, Artificial Sequence
  chemically synthesized
KKRELQELNQIRRNLEQSNASLLKKR

SEQ ID NO: 414 - protein, 37 aa, Artificial Sequence
  chemically synthesized
KKRNHMAWVWGIVGLIQAPMPLICYYFFVIRPDRKKR

SEQ ID NO: 415 - protein, 40 aa, Artificial Sequence
  chemically synthesized
KKRLFEEQQEAKKIDYANSRIKAIKLIGAIIFFMKSSKKR

SEQ ID NO: 416 - protein, 28 aa, Artificial Sequence
  chemically synthesized
KKRKKIPGLAMIVIGNNPASLIYVNKKR

SEQ ID NO: 417 - protein, 27 aa, Artificial Sequence
  chemically synthesized
KKRPELLIAFGGCMAQLPEVRQKLKKR

SEQ ID NO: 418 - protein, 30 aa, Artificial Sequence; identical to SEQ ID NO: 366
  chemically synthesized

SEQ ID NO: 419 - protein, 30 aa, Artificial Sequence; identical to SEQ ID NO: 397
  chemically synthesized

SEQ ID NO: 420 - protein, 32 aa, Artificial Sequence
  chemically synthesized
KKRGYQKYGVRPRLAKKKTVMCKIARKQGKKR

SEQ ID NO: 421 - protein, 31 aa, Artificial Sequence
  chemically synthesized
KKRSSHSKKQRGNKSRGFDQKSQRVSKGKKR

SEQ ID NO: 422 - protein, 32 aa, Artificial Sequence; identical to SEQ ID NO: 420
  chemically synthesized

SEQ ID NO: 423 - protein, 31 aa, Artificial Sequence
  chemically synthesized
KKRSSHSKKQRGNKSRGFDQKSQRSSKGKKR

SEQ ID NO: 424 - protein, 30 aa, Artificial Sequence; identical to SEQ ID NO: 370
  chemically synthesized

SEQ ID NO: 425 - protein, 30 aa, Artificial Sequence; identical to SEQ ID NO: 366
  chemically synthesized

SEQ ID NO: 426 - protein, 44 aa, Artificial Sequence
  chemically synthesized
KKRRKLLKEARGYRGTKHTSYKRAKEQVWKSGVYAYVGRKQKKR

SEQ ID NO: 427 - protein, 30 aa, Artificial Sequence; identical to SEQ ID NO: 366
  chemically synthesized

SEQ ID NO: 428 - protein, 46 aa, Artificial Sequence; identical to SEQ ID NO: 371
  chemically synthesized

SEQ ID NO: 429 - protein, 46 aa, Artificial Sequence; identical to SEQ ID NO: 371
  chemically synthesized

SEQ ID NO: 430 - protein, 46 aa, Artificial Sequence; identical to SEQ ID NO: 371
  chemically synthesized

SEQ ID NO: 431 - protein, 46 aa, Artificial Sequence; identical to SEQ ID NO: 371
  chemically synthesized

SEQ ID NO: 432 - protein, 30 aa, Artificial Sequence; identical to SEQ ID NO: 399
  chemically synthesized

SEQ ID NO: 433 - protein, 30 aa, Artificial Sequence; identical to SEQ ID NO: 386
  chemically synthesized

SEQ ID NO: 434 - protein, 27 aa, Artificial Sequence
  chemically synthesized
KKRMPNTVFIFLVPPKKKDLYDRLKKR

SEQ ID NO: 435 - protein, 30 aa, Artificial Sequence; identical to SEQ ID NO: 366
  chemically synthesized

SEQ ID NO: 436 - protein, 30 aa, Artificial Sequence; identical to SEQ ID NO: 366
  chemically synthesized

SEQ ID NO: 437 - protein, 30 aa, Artificial Sequence; identical to SEQ ID NO: 366
  chemically synthesized

SEQ ID NO: 438 - protein, 45 aa, Artificial Sequence
  chemically synthesized
KKRKGMSNKKVLTGVVVATKCDKTIKVMVSRMVRHKTYKKIVKKR

SEQ ID NO: 439 - protein, 30 aa, Artificial Sequence; identical to SEQ ID NO: 397
  chemically synthesized

SEQ ID NO: 440 - protein, 46 aa, Artificial Sequence; identical to SEQ ID NO: 371
  chemically synthesized

SEQ ID NO: 441 - protein, 40 aa, Artificial Sequence
  chemically synthesized
KKRILDTFFKRNNSNHKDFVEHEEKRKSLLKIAINAFKKR

SEQ ID NO: 442 - protein, 44 aa, Artificial Sequence
  chemically synthesized
KKRDNTRLIHYEGTTRRGESYYVDVFSLMYPKMDILLEYASKKR

SEQ ID NO: 443 - protein, 30 aa, Artificial Sequence
  chemically synthesized
KKRFALTGTGKIKRKHAFHSHILTKKSKKR

SEQ ID NO: 444 - protein, 41 aa, Artificial Sequence
  chemically synthesized
KKRATVRIQGQTYKVVSSEEPAHVKEVASYMNKKMEELKKR

SEQ ID NO: 445 - protein, 46 aa, Artificial Sequence; identical to SEQ ID NO: 371
  chemically synthesized

SEQ ID NO: 446 - protein, 30 aa, Artificial Sequence; identical to SEQ ID NO: 366
  chemically synthesized

SEQ ID NO: 447 - protein, 30 aa, Artificial Sequence; identical to SEQ ID NO: 366
  chemically synthesized

SEQ ID NO: 448 - protein, 30 aa, Artificial Sequence; identical to SEQ ID NO: 443
  chemically synthesized

SEQ ID NO: 449 - protein, 30 aa, Artificial Sequence
  chemically synthesized
KKREFETQGRKPHWRFLLPNFENDPLQKKR

SEQ ID NO: 450 - protein, 46 aa, Artificial Sequence
  chemically synthesized
KKRKIIALCGIDTRALTVLIREKGALNGIIAHDPNGNFDINTLKKR

SEQ ID NO: 451 - protein, 36 aa, Artificial Sequence
  chemically synthesized
KKRSRGVGSEGPAVFREKSTTQVDVEARKSQKDKKR

SEQ ID NO: 452 - protein, 42 aa, Artificial Sequence
  chemically synthesized
KKRLFKLAKGFVGDRKNHLRLTSGAVMRAMAYNYAHRKQKKR

SEQ ID NO: 453 - protein, 36 aa, Artificial Sequence
  chemically synthesized
KKRFERKKEASPADTPPESDSTTENASVEKKAEKKR

SEQ ID NO: 454 - protein, 27 aa, Artificial Sequence
  chemically synthesized
KKRLDKEGVMKSVKAHRFYSKPSIKKR

SEQ ID NO: 455 - protein, 45 aa, Artificial Sequence
  chemically synthesized
KKRPEQGRIAALYSDIVILADEDPRGEDSVELLEMIAAGCPEKKR

SEQ ID NO: 456 - protein, 36 aa, Artificial Sequence
  chemically synthesized
KKRSLPNLRTVRVKLEDGTTVKLRVAASTLRTMKKR

SEQ ID NO: 457 - protein, 30 aa, Artificial Sequence
  chemically synthesized
KKRFRLSAKGKAMHRQSGTSHLAKGLSKKR

SEQ ID NO: 458 - protein, 30 aa, Artificial Sequence; identical to SEQ ID NO: 386
  chemically synthesized

SEQ ID NO: 459 - protein, 30 aa, Artificial Sequence; identical to SEQ ID NO: 386
  chemically synthesized

SEQ ID NO: 460 - protein, 30 aa, Artificial Sequence; identical to SEQ ID NO: 386
  chemically synthesized

SEQ ID NO: 461 - protein, 42 aa, Artificial Sequence; identical to SEQ ID NO: 392
  chemically synthesized

SEQ ID NO: 462 - protein, 42 aa, Artificial Sequence
  chemically synthesized
KKRIQYNERLEFLGDSVLQLVITEYLFMNYKDKSEGELSKKR

SEQ ID NO: 463 - protein, 30 aa, Artificial Sequence
  chemically synthesized
KKRFTLTGTGKIKRKHAFHSHILTKKSKKR

SEQ ID NO: 464 - protein, 43 aa, Artificial Sequence
  chemically synthesized
KKRDLENCSYQASGISVVSHPKNPYVPTSHLNIRFFLAKNKKR

SEQ ID NO: 465 - protein, 26 aa, Artificial Sequence
  chemically synthesized
KKRRDFLKNNHVSFLISIHADSSKKR

SEQ ID NO: 466 - protein, 46 aa, Artificial Sequence; identical to SEQ ID NO: 371
  chemically synthesized

SEQ ID NO: 467 - protein, 32 aa, Artificial Sequence; identical to SEQ ID NO: 420
  chemically synthesized

SEQ ID NO: 468 - protein, 31 aa, Artificial Sequence
  chemically synthesized
KKRSSHSKKQRGNKSRGFDQKSQRGSKGKKR

SEQ ID NO: 469 - protein, 30 aa, Artificial Sequence; identical to SEQ ID NO: 397
  chemically synthesized

SEQ ID NO: 470 - protein, 30 aa, Artificial Sequence
  chemically synthesized
KKREIFTSIFEDKIDLKLFSFLIILIEKKR

SEQ ID NO: 471 - protein, 31 aa, Artificial Sequence
  chemically synthesized
KKRARRPGVPTRGDKKRAPRLGVPARGDKKR

SEQ ID NO: 472 - protein, 31 aa, Artificial Sequence
  chemically synthesized
KKRAPRLGVPARGDKKRARRPGVPAREDKKR

SEQ ID NO: 473 - protein, 31 aa, Artificial Sequence
  chemically synthesized
KKRARRPGVPAREDKKRAPRPGVPTRGDKKR

SEQ ID NO: 474 - protein, 31 aa, Artificial Sequence
  chemically synthesized
KKRAPRPGVPTRGDKKRAPRLGVPARGDKKR

SEQ ID NO: 475 - protein, 45 aa, Artificial Sequence
  chemically synthesized
KKRARRPGVPTRGDKKRAPRLGVPARGDKKRARRPGVPAREDKKR

SEQ ID NO: 476 - protein, 45 aa, Artificial Sequence
  chemically synthesized
KKRAPRLGVPARGDKKRARRPGVPAREDKKRAPRPGVPTRGDKKR

SEQ ID NO: 477 - protein, 45 aa, Artificial Sequence
  chemically synthesized
KKRARRPGVPAREDKKRAPRPGVPTRGDKKRAPRLGVPARGDKKR

SEQ ID NO: 478 - protein, 44 aa, Artificial Sequence; identical to SEQ ID NO: 391
  chemically synthesized

SEQ ID NO: 479 - protein, 45 aa, Artificial Sequence
  chemically synthesized
KKRTSVPDDDFVFTLSDDENDVLENGADEGDEQADEETASGSKKR

SEQ ID NO: 480 - protein, 38 aa, Artificial Sequence
  chemically synthesized
KKRAAAKDDDFVLTLSDDENDVLENGVEEDTLSSSKKR

SEQ ID NO: 481 - protein, 42 aa, Artificial Sequence
  chemically synthesized
KKRLQKQAKEEERARREAEKAAEEAAAKAEQEKKLEEQRKKR

SEQ ID NO: 482 - protein, 45 aa, Artificial Sequence
  chemically synthesized
KKRANADDDFVLTLSDDENDTLNQLEEEGEGDDGALATGSKTKKR

SEQ ID NO: 483 - protein, 44 aa, Artificial Sequence
  chemically synthesized
KKRAQETKIDSKESVKESPKQENSILKRLASSIKKQELPFTKKR

SEQ ID NO: 484 - protein, 46 aa, Artificial Sequence
  chemically synthesized
KKRSAEEEEKDLKKIMMTNKQRKLYNKMQYGINKKETRQDELAKKR

SEQ ID NO: 485 - protein, 35 aa, Artificial Sequence
  chemically synthesized
KKRKAHEERKEEKRSYKKTKSDRSAPKTKAKSKKR

SEQ ID NO: 486 - protein, 41 aa, Artificial Sequence
  chemically synthesized
KKRTIDKVDDSVEDGAEKKPEAAVKNDGETAEKPEKKHKKR

SEQ ID NO: 487 - protein, 39 aa, Artificial Sequence
  chemically synthesized
KKRKANEERKEEGKERSYKKTKADRTKLKTKAKSSSKKR

SEQ ID NO: 488 - protein, 26 aa, Artificial Sequence
  chemically synthesized
KKRAAQKKKEEEELERQKMMMSRKKR

SEQ ID NO: 489 - protein, 38 aa, Artificial Sequence
  chemically synthesized
KKRKREIERLEKMTDEEKKEEQAKEKELQDLIEQVKKR

SEQ ID NO: 490 - protein, 26 aa, Artificial Sequence
  chemically synthesized
KKRGHNSIIGHEKTNALETLKKKKKR

SEQ ID NO: 491 - protein, 43 aa, Artificial Sequence
  chemically synthesized
KKRSAKIKKATFDANKKKEVGVSDLTLLSKISDESINENLKKR

SEQ ID NO: 492 - protein, 37 aa, Artificial Sequence
  chemically synthesized
KKRKAREILDKHRKEEKELVKEGKTPYYLKKAEQKKR

SEQ ID NO: 493 - protein, 39 aa, Artificial Sequence
  chemically synthesized
KKRTHDELEQDGKEEEEKKEGEKPSSQNRAERDEPEKKR

SEQ ID NO: 494 - protein, 35 aa, Artificial Sequence
  chemically synthesized
KKRSLEDNETEIKVSRDTWNTKNMRSLEPPRSKKR

SEQ ID NO: 495 - protein, 35 aa, Artificial Sequence; identical to SEQ ID NO: 494
  chemically synthesized

SEQ ID NO: 496 - protein, 45 aa, Artificial Sequence
  chemically synthesized
KKRLPQAKRACAKCQKDNKKCDDARPCQRCIKAKTDCIDLPRKKR

SEQ ID NO: 497 - protein, 26 aa, Artificial Sequence
  chemically synthesized
KKRNSEEANDENDETNLKIPIPEKKR

SEQ ID NO: 498 - protein, 37 aa, Artificial Sequence
  chemically synthesized
KKRKVNELSQDVISLHSPKESNARKTKKNKNKKKKKR

SEQ ID NO: 499 - protein, 34 aa, Artificial Sequence
  chemically synthesized
KKRKSKSKQESSDSGVSEDDEIPLSDARNKTKKR

SEQ ID NO: 500 - protein, 45 aa, Artificial Sequence
  chemically synthesized
KKRKLKDTVSNCEFTEEDSESSFLLETIQPTKSTLRRSISPLKKR

SEQ ID NO: 501 - protein, 35 aa, Artificial Sequence
  chemically synthesized
KKRAEKKEQQKEKKKEKEKERMKAFIPPEESSKKR

SEQ ID NO: 502 - protein, 35 aa, Artificial Sequence
  chemically synthesized
KKRSANELAIDDQDTKESTDLAGTEDSAPKANKKR

SEQ ID NO: 503 - protein, 44 aa, Artificial Sequence
  chemically synthesized
KKRLTYSELFHKTQELNEELQSCLQKILEASADRNESKQDAKKR

SEQ ID NO: 504 - protein, 31 aa, Artificial Sequence
  chemically synthesized
KKRTKIQCSHFDLLVKLGQGGYGSVWLAKKR

SEQ ID NO: 505 - protein, 35 aa, Artificial Sequence
  chemically synthesized
KKRKSKLVEMTPKGLKKRKRVQIQEGSVSTNTKKR

SEQ ID NO: 506 - protein, 42 aa, Artificial Sequence
  chemically synthesized
KKRNVEEQNLIEQSITESQRIFSEKQRLEQERFNRELLEKKR

SEQ ID NO: 507 - protein, 35 aa, Artificial Sequence; identical to SEQ ID NO: 494
  chemically synthesized

SEQ ID NO: 508 - protein, 35 aa, Artificial Sequence; identical to SEQ ID NO: 494
  chemically synthesized

SEQ ID NO: 509 - protein, 35 aa, Artificial Sequence; identical to SEQ ID NO: 494
  chemically synthesized

SEQ ID NO: 510 - protein, 35 aa, Artificial Sequence; identical to SEQ ID NO: 494
  chemically synthesized

SEQ ID NO: 511 - protein, 35 aa, Artificial Sequence; identical to SEQ ID NO: 494
  chemically synthesized

SEQ ID NO: 512 - protein, 35 aa, Artificial Sequence; identical to SEQ ID NO: 494
  chemically synthesized

SEQ ID NO: 513 - protein, 35 aa, Artificial Sequence; identical to SEQ ID NO: 494
  chemically synthesized

SEQ ID NO: 514 - protein, 35 aa, Artificial Sequence; identical to SEQ ID NO: 494
  chemically synthesized

SEQ ID NO: 515 - protein, 35 aa, Artificial Sequence
  chemically synthesized
KKRSLEDNETEIEVSRDTWNNKNMRSLEPPRSKKR

SEQ ID NO: 516 - protein, 35 aa, Artificial Sequence; identical to SEQ ID NO: 515
  chemically synthesized

SEQ ID NO: 517 - protein, 40 aa, Artificial Sequence
  chemically synthesized
KKRVEKLDWMYAAPSTEGGALGGARIGERDMEEYLLGKKR

SEQ ID NO: 518 - protein, 40 aa, Artificial Sequence; identical to SEQ ID NO: 517
  chemically synthesized

SEQ ID NO: 519 - protein, 35 aa, Artificial Sequence; identical to SEQ ID NO: 515
  chemically synthesized

SEQ ID NO: 520 - protein, 35 aa, Artificial Sequence; identical to SEQ ID NO: 515
  chemically synthesized

SEQ ID NO: 521 - protein, 29 aa, Artificial Sequence
  chemically synthesized
KKRKRRSKKINKLTDGQIRINHVSSEKKR

SEQ ID NO: 522 - protein, 37 aa, Artificial Sequence
  chemically synthesized
KKRSKLTSKHAETADSQSSAASSDHESGQSQAHTKKR

SEQ ID NO: 523 - protein, 39 aa, Artificial Sequence
  chemically synthesized
KKRDAETADIGDQSEVESDTEELKKIMFGEKKKLNKKKR

SEQ ID NO: 524 - protein, 29 aa, Artificial Sequence
  chemically synthesized
KKRAGGTKRKKATAEPSDNDILSQMTKKR

SEQ ID NO: 525 - protein, 35 aa, Artificial Sequence; identical to SEQ ID NO: 515
  chemically synthesized

SEQ ID NO: 526 - protein, 33 aa, Artificial Sequence
  chemically synthesized
KKRVYYDDGLTEEQFLEAVEDDNMSLEDAIKKR

SEQ ID NO: 527 - protein, 43 aa, Artificial Sequence
  chemically synthesized
KKRSAKIKKATFDANKKKEVGISDLTLLSKISDESINENLKKR

SEQ ID NO: 528 - protein, 37 aa, Artificial Sequence
  chemically synthesized
KKRKRLESEQEQDQDEIASDSDMEDIDSDLENNSKKR

SEQ ID NO: 529 - protein, 26 aa, Artificial Sequence
  chemically synthesized
KKRGHNSIIGHEKTNALETLKKKKKR

SEQ ID NO: 530 - protein, 35 aa, Artificial Sequence; identical to SEQ ID NO: 494
  chemically synthesized

SEQ ID NO: 531 - protein, 35 aa, Artificial Sequence; identical to SEQ ID NO: 494
  chemically synthesized

SEQ ID NO: 532 - protein, 35 aa, Artificial Sequence
  chemically synthesized
KKRAHSSGERRSSVSKPARDPSDKPEESPSKKKKR

SEQ ID NO: 533 - protein, 42 aa, Artificial Sequence
  chemically synthesized
KKRLKSSLRFRKLEILLELPFFIPFEERVDLFYMFIALDKKR

SEQ ID NO: 534 - protein, 35 aa, Artificial Sequence
  chemically synthesized
KKRMQAVFTNVHKFKPDASRDESKETYYIGLKKKR

SEQ ID NO: 535 - protein, 35 aa, Artificial Sequence
  chemically synthesized
KKRKPTEVNDSENNSSEEDKKKGQNVTSETHSKKR

SEQ ID NO: 536 - protein, 42 aa, Artificial Sequence
  chemically synthesized
KKREAEAQWCRIHGQSCWKRDALPEAEPQWCRIHGQSCWKKR

SEQ ID NO: 537 - protein, 35 aa, Artificial Sequence; identical to SEQ ID NO: 494
  chemically synthesized

SEQ ID NO: 538 - protein, 35 aa, Artificial Sequence; identical to SEQ ID NO: 515
  chemically synthesized

SEQ ID NO: 539 - protein, 35 aa, Artificial Sequence; identical to SEQ ID NO: 494
  chemically synthesized

SEQ ID NO: 540 - protein, 35 aa, Artificial Sequence; identical to SEQ ID NO: 494
  chemically synthesized

SEQ ID NO: 541 - protein, 45 aa, Artificial Sequence
  chemically synthesized
KKRKDPDSDDWSESNSKENKIDNKHLNLLSSDSEIEQDYQKAKKR

SEQ ID NO: 542 - protein, 35 aa, Artificial Sequence; identical to SEQ ID NO: 494
  chemically synthesized

SEQ ID NO: 543 - protein, 35 aa, Artificial Sequence; identical to SEQ ID NO: 494
  chemically synthesized

SEQ ID NO: 544 - protein, 35 aa, Artificial Sequence
  chemically synthesized
KKRVIDDEDDKEVDTTLPGWGEWAGAGSKPKNKKR

SEQ ID NO: 545 - protein, 35 aa, Artificial Sequence; identical to SEQ ID NO: 494
  chemically synthesized

SEQ ID NO: 546 - protein, 35 aa, Artificial Sequence; identical to SEQ ID NO: 494
  chemically synthesized

SEQ ID NO: 547 - protein, 26 aa, Artificial Sequence
  chemically synthesized
KKRRRGNGKHLSRKEKRKMERADKKR

SEQ ID NO: 548 - protein, 35 aa, Artificial Sequence; identical to SEQ ID NO: 494
  chemically synthesized

SEQ ID NO: 549 - protein, 40 aa, Artificial Sequence
  chemically synthesized
KKRNGSMHNMYYASVPFLLFSNAYSIDFSRHVNEFLEKKR

SEQ ID NO: 550 - protein, 35 aa, Artificial Sequence; identical to SEQ ID NO: 515
  chemically synthesized

SEQ ID NO: 551 - protein, 35 aa, Artificial Sequence; identical to SEQ ID NO: 494
  chemically synthesized

SEQ ID NO: 552 - protein, 28 aa, Artificial Sequence
  chemically synthesized
KKRYMTTKQTRTVQNQTMPRSNTTTKKR

SEQ ID NO: 553 - protein, 37 aa, Artificial Sequence
  chemically synthesized
KKREFEAAPAKTYADFLRAYQSWNTFVNPDRPNLKKR

SEQ ID NO: 554 - protein, 37 aa, Artificial Sequence
  chemically synthesized
KKREFEAAPEKSYADFLRAYHSWNTFVNPDRPNLKKR

SEQ ID NO: 555 - protein, 37 aa, Artificial Sequence; identical to SEQ ID NO: 553
  chemically synthesized

SEQ ID NO: 556 - protein, 46 aa, Artificial Sequence
  chemically synthesized
KKRDKKKQLKLAKEEERQRREAERLAEQAAQKALEAKRQEEARKKR

SEQ ID NO: 557 - protein, 26 aa, Artificial Sequence
  chemically synthesized
KKREALLNIEEGRDVKGNRMVGMKKR

SEQ ID NO: 558 - protein, 35 aa, Artificial Sequence; identical to SEQ ID NO: 494
  chemically synthesized

SEQ ID NO: 559 - protein, 35 aa, Artificial Sequence; identical to SEQ ID NO: 494
  chemically synthesized

SEQ ID NO: 560 - protein, 35 aa, Artificial Sequence; identical to SEQ ID NO: 515
  chemically synthesized

SEQ ID NO: 561 - protein, 35 aa, Artificial Sequence; identical to SEQ ID NO: 494
  chemically synthesized

SEQ ID NO: 562 - protein, 35 aa, Artificial Sequence; identical to SEQ ID NO: 494
  chemically synthesized

SEQ ID NO: 563 - protein, 35 aa, Artificial Sequence; identical to SEQ ID NO: 494
  chemically synthesized

SEQ ID NO: 564 - protein, 35 aa, Artificial Sequence; identical to SEQ ID NO: 494
  chemically synthesized

SEQ ID NO: 565 - protein, 35 aa, Artificial Sequence; identical to SEQ ID NO: 494
  chemically synthesized

SEQ ID NO: 566 - protein, 35 aa, Artificial Sequence; identical to SEQ ID NO: 515
  chemically synthesized

SEQ ID NO: 567 - protein, 41 aa, Artificial Sequence
  chemically synthesized
KKRKLGPKAPNPLSVKKKKKVNSPSDEVKDKEDTSKEKKKR

SEQ ID NO: 568 - protein, 35 aa, Artificial Sequence; identical to SEQ ID NO: 494
  chemically synthesized

SEQ ID NO: 569 - protein, 35 aa, Artificial Sequence; identical to SEQ ID NO: 515
  chemically synthesized

SEQ ID NO: 570 - protein, 35 aa, Artificial Sequence; identical to SEQ ID NO: 494
  chemically synthesized

SEQ ID NO: 571 - protein, 35 aa, Artificial Sequence; identical to SEQ ID NO: 515
  chemically synthesized

SEQ ID NO: 572 - protein, 35 aa, Artificial Sequence; identical to SEQ ID NO: 515
  chemically synthesized

SEQ ID NO: 573 - protein, 31 aa, Artificial Sequence
  chemically synthesized
KKRKGGNGSSDEEEDSDDDMAGKDKGKRKKR

SEQ ID NO: 574 - protein, 45 aa, Artificial Sequence
  chemically synthesized
KKRKRKHGGSGNAALTSANAAKSLVKTTLSSKGEASAEKQEMKKR

SEQ ID NO: 575 - protein, 26 aa, Artificial Sequence
  chemically synthesized
KKRKADRRSDKEDDKLGKKEKKSKKR

SEQ ID NO: 576 - protein, 44 aa, Artificial Sequence
  chemically synthesized
KKRDKKEKKERRDKKEKKEKRRIEKAAAESGAETGDSISEEKKR

SEQ ID NO: 577 - protein, 46 aa, Artificial Sequence
  chemically synthesized
KKRTAPKDDDFVLTLSDDENDVFSGINEDGDDHLDEETAKSTTKKR

SEQ ID NO: 578 - protein, 42 aa, Artificial Sequence
  chemically synthesized
KKRVDEAREKRVGRFRDGMGSKKELKGREDIRKARIEKEKKR

SEQ ID NO: 579 - protein, 34 aa, Artificial Sequence
  chemically synthesized
KKRIDRVDWMYATPATTGSGSAAEMEDYLLGKKR

SEQ ID NO: 580 - protein, 34 aa, Artificial Sequence
  chemically synthesized
KKRKTSDRETQNVTTKKQKIETIERKKSSLKKKR

SEQ ID NO: 581 - protein, 45 aa, Artificial Sequence
  chemically synthesized
KKRAAARDDDFVLTLSDDENDIFENGVEEDGDNAQEDTLSSSKKR

SEQ ID NO: 582 - protein, 42 aa, Artificial Sequence; identical to SEQ ID NO: 481
  chemically synthesized

SEQ ID NO: 583 - protein, 41 aa, Artificial Sequence
  chemically synthesized
KKRLQQLAKEEERKRKEEELKAKEEEQRLQKEKLKAEQKKR

SEQ ID NO: 584 - protein, 37 aa, Artificial Sequence
  chemically synthesized
KKRSEIERYSKMFWQNYQKIEGYEKYLSQIEAVEKKR

SEQ ID NO: 585 - protein, 27 aa, Artificial Sequence
  chemically synthesized
KKRVAPLLVSTSAAPKNVLQKPLEKKR

SEQ ID NO: 586 - protein, 26 aa, Artificial Sequence
  chemically synthesized
KKRAAKKRQEEEELERQKMMMSRKKR

SEQ ID NO: 587 - protein, 46 aa, Artificial Sequence
  chemically synthesized
KKRSAEDEEKDLKKIMMSNKQRKLYKKMQYGIDKKEARQDDLTKKR

SEQ ID NO: 588 - protein, 44 aa, Artificial Sequence
  chemically synthesized
KKRGSEAVEESDSDSEESESESDDDKKSRKSSKKEKKDKKSKKR

SEQ ID NO: 589 - protein, 41 aa, Artificial Sequence
  chemically synthesized
KKRAEKSRTPLTSSTAVISDRPVASVSADTTLVGSVASKKR

SEQ ID NO: 590 - protein, 34 aa, Artificial Sequence
  chemically synthesized
KKRFSGSSVTVAMTTAAAAAARLTAFKVTKPKKR

SEQ ID NO: 591 - protein, 28 aa, Artificial Sequence
  chemically synthesized
KKREVGVSDLTLLSKVSEEAINENLKKR

SEQ ID NO: 592 - protein, 33 aa, Artificial Sequence
  chemically synthesized
KKRLKRTKVPSKIWVDNLNMEYIYAKGESIKKR

SEQ ID NO: 593 - protein, 39 aa, Artificial Sequence
  chemically synthesized
KKRYKSELDRAEAIERQLIREEEHLKSLQEKGETQAKKR

SEQ ID NO: 594 - protein, 41 aa, Artificial Sequence
  chemically synthesized
KKRKLEVKSDQQTPPATQSEINHTSSVRLEENIQGIKRKKR

SEQ ID NO: 595 - protein, 39 aa, Artificial Sequence
  chemically synthesized
KKRGQAAKEAVEVDLVDVGDYVKKATERFQHTVELHKKR

SEQ ID NO: 596 - protein, 33 aa, Artificial Sequence
  chemically synthesized
KKRQRKRRREAGSGDEEDEGVSDEVLAARAKKR

SEQ ID NO: 597 - protein, 42 aa, Artificial Sequence
  chemically synthesized
KKRVAEAKEKRIGKYKDGEGSKRELKTATDIRKARAVAEKKR

SEQ ID NO: 598 - protein, 34 aa, Artificial Sequence
  chemically synthesized
KKRDPPPRPKYEVFTDAQLSREIASYGFKPIKKR

SEQ ID NO: 599 - protein, 39 aa, Artificial Sequence
  chemically synthesized
KKRGISALMAKAKEASDVATNGYFKHWDGGVSEDDEKKR

SEQ ID NO: 600 - protein, 28 aa, Artificial Sequence
  chemically synthesized
KKRQSKRLTTRKREGMLKRARANERKKR

SEQ ID NO: 601 - protein, 27 aa, Artificial Sequence
  chemically synthesized
KKRKKKTVKELNRIRRASRISKKEKKR

SEQ ID NO: 602 - protein, 38 aa, Artificial Sequence
  chemically synthesized
KKRKKKTVKELNRIRRASRISKKEKKRIFKRYIGMKKR

SEQ ID NO: 603 - protein, 35 aa, Artificial Sequence; identical to SEQ ID NO: 494
  chemically synthesized

SEQ ID NO: 604 - protein, 41 aa, Artificial Sequence
  chemically synthesized
KKRTGSQYSYYNGGHNVESTNENKLVDASDLLANVDILKKR

SEQ ID NO: 605 - protein, 35 aa, Artificial Sequence; identical to SEQ ID NO: 494
  chemically synthesized

SEQ ID NO: 606 - protein, 35 aa, Artificial Sequence; identical to SEQ ID NO: 494
  chemically synthesized

SEQ ID NO: 607 - protein, 40 aa, Artificial Sequence
  chemically synthesized
KKRVWSREKRLLSEMAITNHSPLLNVDDYRKFREDLWKKR

SEQ ID NO: 608 - protein, 33 aa, Artificial Sequence
  chemically synthesized
KKRKRRAKAAEREAQEAEELSMELGLDENLKKR

SEQ ID NO: 609 - protein, 35 aa, Artificial Sequence
  chemically synthesized
KKRRRSSSYSPSPVKKKKKKSSKKHKRRRSFSKKR

SEQ ID NO: 610 - protein, 40 aa, Artificial Sequence
  chemically synthesized
KKRKKPKGKETFEPEDKTVKQEQINTEPLEDTVLSPTKKR

SEQ ID NO: 611 - protein, 42 aa, Artificial Sequence
  chemically synthesized
KKRKKQSQESRMPETVPQEEMPGPPLNSESGEEAPTGRDKKR

SEQ ID NO: 612 - protein, 43 aa, Artificial Sequence
  chemically synthesized
KKRKRQKGTEGMEPEEGVTVESQPQVKVEPLEEAIPLPPTKKR

SEQ ID NO: 613 - protein, 26 aa, Artificial Sequence
  chemically synthesized
KKRKLDPEIVPEEKDCGDAEGNSKKR

SEQ ID NO: 614 - protein, 46 aa, Artificial Sequence
  chemically synthesized
KKRSSIWQFFSRLFSSSSNTTKKPEPPVNLKYNAPTSHVTPSVKKR

SEQ ID NO: 615 - protein, 36 aa, Artificial Sequence
  chemically synthesized
KKRRAPPPPGSGPPVQDKASEKVSLGSQIDLQKKKR

SEQ ID NO: 616 - protein, 37 aa, Artificial Sequence
  chemically synthesized
KKRQRSESRSASEHSSSAESERSYKKSKKHKKKSKKR

SEQ ID NO: 617 - protein, 32 aa, Artificial Sequence
  chemically synthesized
KKRKALEFVTNPDIAAKKKMKKHKNKSEAKKR

SEQ ID NO: 618 - protein, 45 aa, Artificial Sequence
  chemically synthesized
KKRFRQLSILVHPDKNQDDADRAQKAFEAVDKAYKLLLDQEQKKR

SEQ ID NO: 619 - protein, 45 aa, Artificial Sequence
  chemically synthesized
KKRQQARKTASVLSKDDVAPESGDTTVKKPESKKEQTPEHGKKKR

SEQ ID NO: 620 - protein, 42 aa, Artificial Sequence
  chemically synthesized
KKRARLEEENEELRQRLIETELAKQVLQTELERPREHSLKKR

SEQ ID NO: 621 - protein, 35 aa, Artificial Sequence
  chemically synthesized
KKRRHRSKVNGLQRGRKKDRPRKHLTLNNKVQKKR

SEQ ID NO: 622 - protein, 30 aa, Artificial Sequence
  chemically synthesized
KKRRKEKKVKHKKKGKKQKHCRRHKQTKKR

SEQ ID NO: 623 - protein, 26 aa, Artificial Sequence
  chemically synthesized
KKRPRNSYKCGTNTMEREESEQTKKR

SEQ ID NO: 624 - protein, 35 aa, Artificial Sequence
  chemically synthesized
KKRQTQSESSNYDSELEKEIKSMSKIGAARTTKKR

SEQ ID NO: 625 - protein, 41 aa, Artificial Sequence
  chemically synthesized
KKRGRKPGSVVAAAAAEAKKKAVKESSIRSVQETVLPIKKR

SEQ ID NO: 626 - protein, 27 aa, Artificial Sequence
  chemically synthesized
KKRGDGFVNESRLQKIVSVIDEEIKKR

SEQ ID NO: 627 - protein, 27 aa, Artificial Sequence
  chemically synthesized
KKRKERFGIVTSSAGTGTTEDTEAKKR

SEQ ID NO: 628 - protein, 40 aa, Artificial Sequence
  chemically synthesized
KKRKREESVEQKRSKQNATKLSALLFKHKEQLRAEILKKR

SEQ ID NO: 629 - protein, 33 aa, Artificial Sequence
  chemically synthesized
KKRKEEERKKKETDQKKEAVAPVQEESDLEKKR

SEQ ID NO: 630 - protein, 43 aa, Artificial Sequence
  chemically synthesized
KKRHKSSSSSSSSSSDSDSSSDSQSSSDSSDSESATEEKSKKR

SEQ ID NO: 631 - protein, 34 aa, Artificial Sequence
  chemically synthesized
KKRKKDFQHLISSPLKKSRICDETANATSTLKKR

SEQ ID NO: 632 - protein, 37 aa, Artificial Sequence
  chemically synthesized
KKRKKDFQHLISSPLKKSRICDETANATSTLKKRKKR

SEQ ID NO: 633 - protein, 45 aa, Artificial Sequence
  chemically synthesized
KKRDQTASAPATPLVNKHRPTFTRSNTISKPYISNTLPSDAPKKR

SEQ ID NO: 634 - protein, 36 aa, Artificial Sequence
  chemically synthesized
KKRKNKSSKRKHRKYSDSDSNSESDTNSDSDDDKKR

SEQ ID NO: 635 - protein, 39 aa, Artificial Sequence
  chemically synthesized
KKRRQKEEEEATASERNDADEKHPEHAEQNIRKSKKKKR

SEQ ID NO: 636 - protein, 46 aa, Artificial Sequence
  chemically synthesized
KKRQQQEEEDLNLEDRGEETVLGGGTREAESRACSDGRSRKSKKKR

SEQ ID NO: 637 - protein, 38 aa, Artificial Sequence
  chemically synthesized
KKRIELKHDKKARAMAKRTKDNFHGYNGIPIEEKSKKR

SEQ ID NO: 638 - protein, 41 aa, Artificial Sequence
  chemically synthesized
KKRIERFYNCLQHALERETMTNLHPKIKEKNNSSYIHKKKR

SEQ ID NO: 639 - protein, 26 aa, Artificial Sequence
  chemically synthesized
KKRRKGSGSEQEGEDEEGGERKKKKR

SEQ ID NO: 640 - protein, 27 aa, Artificial Sequence
  chemically synthesized
KKRRRHPKGEEGSDDDETENGPKPKKR

SEQ ID NO: 641 - protein, 37 aa, Artificial Sequence
  chemically synthesized
KKRGGGGGRRSKKGGEFDEFVNDDTDDDLPISKKKKR

SEQ ID NO: 642 - protein, 36 aa, Artificial Sequence
  chemically synthesized
KKRTALHLACANGNSEVVSLLLDRQCQLHVFDSKKR

SEQ ID NO: 643 - protein, 39 aa, Artificial Sequence
  chemically synthesized
KKRKRKEEGEKEKKPRKKVPKQLGVVALNSHKSEKKKKR

SEQ ID NO: 644 - protein, 46 aa, Artificial Sequence
  chemically synthesized
KKRLDGIEEVEREITRGRSRKGSELTCPEDNKIKELTLEIERLKKR

SEQ ID NO: 645 - protein, 33 aa, Artificial Sequence
  chemically synthesized
KKRKKSYPDDKPLSSESSSESDYEEDVQAKKKR

SEQ ID NO: 646 - protein, 43 aa, Artificial Sequence
  chemically synthesized
KKRKALEAKKEEEEIQREMVKLRREIIERRRTVKAAWKIEKKR

SEQ ID NO: 647 - protein, 37 aa, Artificial Sequence
  chemically synthesized
KKRKRCGVCEPCQQKTNCGECTYCKNRKNSHQICKKR

SEQ ID NO: 648 - protein, 39 aa, Artificial Sequence
  chemically synthesized
KKRMEAEQEMVRMVRAATLIQALWKGYLVRSLLRSKKKR

SEQ ID NO: 649 - protein, 31 aa, Artificial Sequence
  chemically synthesized
KKRGRTPKTLISHPISAPSKTAEPLKFPKKR

SEQ ID NO: 650 - protein, 27 aa, Artificial Sequence
  chemically synthesized
KKRVGDGSVLRTIHGKEMSKIARKKKR

SEQ ID NO: 651 - protein, 35 aa, Artificial Sequence
  chemically synthesized
KKRKDEGKSRTTLPERPLTEVKAETRAEEAPEKKR

SEQ ID NO: 652 - protein, 32 aa, Artificial Sequence
  chemically synthesized
KKRKSEDGTPAEDGTPAATGGSQPPSMGRKKR

SEQ ID NO: 653 - protein, 35 aa, Artificial Sequence
  chemically synthesized
KKRKKRKSEDGTPAEDGTPAATGGSQPPSMGRKKR

SEQ ID NO: 654 - protein, 33 aa, Artificial Sequence
  chemically synthesized
KKRKKISGPNPLSCLKKKKKAPDTQSSASEKKR

SEQ ID NO: 655 - protein, 32 aa, Artificial Sequence
  chemically synthesized
KKRSREDAGDNDDTEGAIGVRNKVAGGKMKKR

SEQ ID NO: 656 - protein, 42 aa, Artificial Sequence
  chemically synthesized
KKRKGSSSQAPASKKLNKEELPVIPKGKPKSGRVWKDRSKKR

SEQ ID NO: 657 - protein, 44 aa, Artificial Sequence
  chemically synthesized
KKRSKLKHRDLEVSCEPDGFEMNFQCAPPLPSDTDQPQETVKKR

SEQ ID NO: 658 - protein, 45 aa, Artificial Sequence
  chemically synthesized
KKRRKKSAGERLKEEKPKKSKTSGASKTKGKSKLNTITPVVGKKR

SEQ ID NO: 659 - protein, 29 aa, Artificial Sequence
  chemically synthesized
KKRKKGEKQIPGEEKGRKRRRVKEDKKKR

SEQ ID NO: 660 - protein, 32 aa, Artificial Sequence
  chemically synthesized
KKREAEEKEKRVRIAKELAERERLERQQKKKR

SEQ ID NO: 661 - protein, 31 aa, Artificial Sequence
  chemically synthesized
KKRAATTVLQELKKLPPLPVVEKPKLFFKKR

SEQ ID NO: 662 - protein, 34 aa, Artificial Sequence
  chemically synthesized
KKRGLTGDSKKATKESGLISTKKRKMVEMLEKKR

SEQ ID NO: 663 - protein, 27 aa, Artificial Sequence
  chemically synthesized
KKRKREKKELKLENHQENSRNQKPKKR

SEQ ID NO: 664 - protein, 44 aa, Artificial Sequence
  chemically synthesized
KKRSYKDFLREEEEIAAQVRNSSKKKLKDSELYFLGTDTHKKKR

SEQ ID NO: 665 - protein, 34 aa, Artificial Sequence
  chemically synthesized
KKRQLLDSDEEQEEDEGRNRAPELGAPGIQKKKR

SEQ ID NO: 666 - protein, 38 aa, Artificial Sequence
  chemically synthesized
KKRGKKKHIKEEPLSEEEPCTSTAIASPEKKKKKKKKR

SEQ ID NO: 667 - protein, 39 aa, Artificial Sequence
  chemically synthesized
KKRGRPKKQPLLTVETIHEGTSTSPVSPISREFPGTKKR

SEQ ID NO: 668 - protein, 40 aa, Artificial Sequence
  chemically synthesized
KKRKGKVKKTKKKKTSNKKEKTKKSKSKNKKDAKKKAKKR

SEQ ID NO: 669 - protein, 41 aa, Artificial Sequence
  chemically synthesized
KKRKFTKEDAIYGVFNDGWGDYEDEEESKMTEEEYYKMKKR

SEQ ID NO: 670 - protein, 32 aa, Artificial Sequence
  chemically synthesized
KKRKRATTTEEPQGSRNELVALENIEGIYKKR

SEQ ID NO: 671 - protein, 38 aa, Artificial Sequence
  chemically synthesized
KKRGPKKKKYKPEAAEVEKKNEEGDTVKENPIAEAKKR

SEQ ID NO: 672 - protein, 40 aa, Artificial Sequence
  chemically synthesized
KKRINEVSTTEGAPAEKKKKVEKWLNTSSEDGEGTKKKKR

SEQ ID NO: 673 - protein, 32 aa, Artificial Sequence
  chemically synthesized
KKRNFDEIDRSSMPFPYATKRFYHLSSFDKKR

SEQ ID NO: 674 - protein, 46 aa, Artificial Sequence
  chemically synthesized
KKRKNIKLFLNIINSNEYINVNKIFHGKCIYELPFYVNKERIKKKR

SEQ ID NO: 675 - protein, 26 aa, Artificial Sequence
  chemically synthesized
KKRKAMVEELIKRGYAPDPIADWKKR

SEQ ID NO: 676 - protein, 44 aa, Artificial Sequence
  chemically synthesized
KKRRGRKPKKKDDPKMELKDEVKDLKDFVVEESTSASSSAPKKR

SEQ ID NO: 677 - protein, 32 aa, Artificial Sequence
  chemically synthesized
KKRLEKENRKIKEEDDEDSDDEDDEKAKKKKR

SEQ ID NO: 678 - protein, 44 aa, Artificial Sequence
  chemically synthesized
KKRKRGPKKKKFKPEVAGKAAETENDDVAAAPEEADPIAEAKKR

SEQ ID NO: 679 - protein, 46 aa, Artificial Sequence
  chemically synthesized
KKRKITDEKDAQHVPAEKREKVENWLKKSTEKPTSSQSDAEKKKKR

SEQ ID NO: 680 - protein, 29 aa, Artificial Sequence
  chemically synthesized
KKRDDNKDKEGSSMDKLREESRRQYLKKR

SEQ ID NO: 681 - protein, 35 aa, Artificial Sequence
  chemically synthesized
KKRVTSKSRTKRVKMFKQCQWVDADNQRDIKRKKR

SEQ ID NO: 682 - protein, 38 aa, Artificial Sequence
  chemically synthesized
KKRMTEKDISSSESSISESKSLNCSASNQNENEKRKKR

SEQ ID NO: 683 - protein, 35 aa, Artificial Sequence; identical to SEQ ID NO: 681
  chemically synthesized

SEQ ID NO: 684 - protein, 38 aa, Artificial Sequence; identical to SEQ ID NO: 682
  chemically synthesized

SEQ ID NO: 685 - protein, 35 aa, Artificial Sequence; identical to SEQ ID NO: 681
  chemically synthesized

SEQ ID NO: 686 - protein, 38 aa, Artificial Sequence; identical to SEQ ID NO: 682
  chemically synthesized

SEQ ID NO: 687 - protein, 35 aa, Artificial Sequence; identical to SEQ ID NO: 681
  chemically synthesized

SEQ ID NO: 688 - protein, 38 aa, Artificial Sequence; identical to SEQ ID NO: 682
  chemically synthesized

SEQ ID NO: 689 - protein, 34 aa, Artificial Sequence
  chemically synthesized
KKRGRPKKPKDENESDYNNTSFSDSNTDGTPKKR

SEQ ID NO: 690 - protein, 30 aa, Artificial Sequence
  chemically synthesized
KKRGRPSKASVGGKSSTAAVAAISPGIKKR

SEQ ID NO: 691 - protein, 32 aa, Artificial Sequence
  chemically synthesized
KKRANRKKANNNKKRASNNRKKANNNNNNKKR

SEQ ID NO: 692 - protein, 41 aa, Artificial Sequence
  chemically synthesized
KKRDWYIQPTCARSGDGLYQGLDWLSDYIFDKKNKKKGKKR

SEQ ID NO: 693 - protein, 35 aa, Artificial Sequence
  chemically synthesized
KKRHLEDSLDMLNEEIVKLRAAEEIRLTDQEDKKR

SEQ ID NO: 694 - protein, 35 aa, Artificial Sequence
  chemically synthesized
KKRNNVFLTITDVIGRVVVSQSAGSCKITTKKKKR

SEQ ID NO: 695 - protein, 44 aa, Artificial Sequence
  chemically synthesized
KKRYYLFFSKKRNNVFLTITDVIGRVVVSQSAGSCKITTKKKKR

SEQ ID NO: 696 - protein, 37 aa, Artificial Sequence
  chemically synthesized
KKREIEIQQQLELQEETTLEIRERNVSLEQEVELKKR

SEQ ID NO: 697 - protein, 43 aa, Artificial Sequence
  chemically synthesized
KKRWFILKGGDLSYYKTKGELVPLGVIHLNTSGHIKNSDRKKR

SEQ ID NO: 698 - protein, 45 aa, Artificial Sequence
  chemically synthesized
KKRPNRLIIDQSDNDDNSMVMLSQAKMDELGLFRGDSVILKGKKR

SEQ ID NO: 699 - protein, 31 aa, Artificial Sequence
  chemically synthesized
KKRKGKGKKRGKGRRRGSKGRKKKKGKGKKR

SEQ ID NO: 700 - protein, 35 aa, Artificial Sequence
  chemically synthesized
KKRARSPSKKARRRSRSTKKTAAKRRKRSSSPKKR

SEQ ID NO: 701 - protein, 26 aa, Artificial Sequence
  chemically synthesized
KKREAEKKKCAKLAKKEKEAAEKKKR

SEQ ID NO: 702 - protein, 27 aa, Artificial Sequence
  chemically synthesized
KKRCKDLAKNKKKGHKKKGRNENRKKR

SEQ ID NO: 703 - protein, 35 aa, Artificial Sequence
  chemically synthesized
KKRKEAAEKKKCEKAAKKRKEAAEKKKCEKSAKKR

SEQ ID NO: 704 - protein, 35 aa, Artificial Sequence
  chemically synthesized
KKRKEEAEKKKCEKTAKKRKEAAEKKKCEKAAKKR

SEQ ID NO: 705 - protein, 35 aa, Artificial Sequence
  chemically synthesized
KKRKEAAEKKKCEKAAKKRKEEAEKKKCEKTAKKR

SEQ ID NO: 706 - protein, 35 aa, Artificial Sequence
  chemically synthesized
KKRKEEAEKKKCEKTAKKRKETAEKKKCEKAAKKR

SEQ ID NO: 707 - protein, 35 aa, Artificial Sequence
  chemically synthesized
KKRKETAEKKKCEKAAKKRKQAAEKKKCEKAAKKR

SEQ ID NO: 708 - protein, 29 aa, Artificial Sequence
  chemically synthesized
KKRGSKTSELKQNETTDAVVVNNEKVKKR

SEQ ID NO: 709 - protein, 26 aa, Artificial Sequence
  chemically synthesized
KKRKSAIDVLKMPLFDILRSSPPKKR

SEQ ID NO: 710 - protein, 42 aa, Artificial Sequence
  chemically synthesized
KKRFNLNLEEARQAFQTFKPDWNKIRYDAMKMQTSLGQMKKR

SEQ ID NO: 711 - protein, 38 aa, Artificial Sequence
  chemically synthesized
KKRSDKRARSESKSRSRSGGRRSRSNSPPNRSPSPKKR

SEQ ID NO: 712 - protein, 34 aa, Artificial Sequence
  chemically synthesized
KKRGVVLKPSVDEETDRRRMLNRIAAVRYREKKR

SEQ ID NO: 713 - protein, 36 aa, Artificial Sequence
  chemically synthesized
KKRFHEMAEKDKQRYEAEMQNYVPPKGAVVGRGKKR

SEQ ID NO: 714 - protein, 36 aa, Artificial Sequence
  chemically synthesized
KKRQHSSRSNESVSSSTSTEKSHKKTKKTKMKEKKR

SEQ ID NO: 715 - protein, 37 aa, Artificial Sequence; identical to SEQ ID NO: 696
  chemically synthesized

SEQ ID NO: 716 - protein, 30 aa, Artificial Sequence
  chemically synthesized
KKRMDDFVSQVGEDRLATYKPFTEDPSKKR

SEQ ID NO: 717 - protein, 28 aa, Artificial Sequence
  chemically synthesized
KKRSKKRNSIDSGRKDKSKKRKSKKKKR

SEQ ID NO: 718 - protein, 31 aa, Artificial Sequence
  chemically synthesized
KKRDSKNRRSHSKSDENEEGEEDDEERRKKR

SEQ ID NO: 719 - protein, 42 aa, Artificial Sequence
  chemically synthesized
KKRLFEDFTNLYIEDDCLLSCSFSFFIYNKSIHLHFNVDKKR

SEQ ID NO: 720 - protein, 26 aa, Artificial Sequence
  chemically synthesized
KKRIPNATEEEIEILEGMLCWNPKKR

SEQ ID NO: 721 - protein, 46 aa, Artificial Sequence
  chemically synthesized
KKRKKDRDHNNNNNNNNNNNNNNNEQTSDSSDSSDSDSESRSKKKR

SEQ ID NO: 722 - protein, 26 aa, Artificial Sequence
  chemically synthesized
KKRAAEQKIIDDEKARLKSIENSKKR

SEQ ID NO: 723 - protein, 38 aa, Artificial Sequence
  chemically synthesized
KKRKCNFSSPLLFSPFKYGVTSPFSPSKMKLKSPFKKR

SEQ ID NO: 724 - protein, 36 aa, Artificial Sequence
  chemically synthesized
KKRLKREKRLKEKQDLLLIKLEKQKEKQLEEQMKKR

SEQ ID NO: 725 - protein, 27 aa, Artificial Sequence
  chemically synthesized
KKRIKFTHMVGRGQYGKVYDALYDKKR

SEQ ID NO: 726 - protein, 35 aa, Artificial Sequence
  chemically synthesized
KKRREKEARKMKRAGGRFKSRATGANAEEKRAKKR

SEQ ID NO: 727 - protein, 39 aa, Artificial Sequence
  chemically synthesized
KKRLQKEEQDRLAAAELERKRLEKEAEEKRIAQELEKKR

SEQ ID NO: 728 - protein, 31 aa, Artificial Sequence
  chemically synthesized
KKRKITSSEYGMSLEFFKKNPKKVVQNLKKR

SEQ ID NO: 729 - protein, 41 aa, Artificial Sequence
  chemically synthesized
KKRDLIKNNKLIHNVDVNYINMITNDNHISSEKCRDIKKKR

SEQ ID NO: 730 - protein, 46 aa, Artificial Sequence
  chemically synthesized
KKRIYGYLFYTTLLKNITSLNNLFVHYILNNYFFFHSKSMYMLKKR

SEQ ID NO: 731 - protein, 31 aa, Artificial Sequence
  chemically synthesized
KKRIFIYENTVYYTPDDCVFCTQLNCTIKKR

SEQ ID NO: 732 - protein, 44 aa, Artificial Sequence
  chemically synthesized
KKRRNEETRSARSVGIAAADARQAAIVAEKTSGPSLLEIHQKKR

SEQ ID NO: 733 - protein, 39 aa, Artificial Sequence
  chemically synthesized
KKRPGTTSKKSIATVTASPEMSSKTTQMEPEQDGEGKKR

SEQ ID NO: 734 - protein, 29 aa, Artificial Sequence
  chemically synthesized
KKRLARGGHVEDPTADPLDISLPSSKKKR

SEQ ID NO: 735 - protein, 27 aa, Artificial Sequence
  chemically synthesized
KKRSDESDDDNIGLVARGSPRFFGKKR

SEQ ID NO: 736 - protein, 45 aa, Artificial Sequence
  chemically synthesized
KKRADDEDILLGERGSPRFFGKKRANDENISFSLRGSPRFFGKKR

SEQ ID NO: 737 - protein, 46 aa, Artificial Sequence
  chemically synthesized
KKRSDDNVALDLRGSPRFFGKRQSSDLDDEISVALRGSPRFFGKKR

SEQ ID NO: 738 - protein, 34 aa, Artificial Sequence
  chemically synthesized
KKRTEDGRPTLSAHPARFSPEDKYSRQRLTIKKR

SEQ ID NO: 739 - protein, 32 aa, Artificial Sequence
  chemically synthesized
KKRRVEKKKSKTKWTERKQKVEHDKEKRQKKR

SEQ ID NO: 740 - protein, 37 aa, Artificial Sequence
  chemically synthesized
KKRPRQPRKRIVMVEEVKRKIRTPIKEEEEVQERKKR

SEQ ID NO: 741 - protein, 33 aa, Artificial Sequence
  chemically synthesized
KKRVQILYIESESEDEDEQDSHDKSLDSPEKKR

SEQ ID NO: 742 - protein, 34 aa, Artificial Sequence
  chemically synthesized
KKRKRGVVNTKAYKETKPAVKKETKATPALHKKR

SEQ ID NO: 743 - protein, 40 aa, Artificial Sequence
  chemically synthesized
KKRKCVITLDEKQVESKRLKKEESNVEATSRPPAQSPKKR

SEQ ID NO: 744 - protein, 37 aa, Artificial Sequence
  chemically synthesized
KKRKKPQTAAKSSSRSDSDSDWANNKAGAPSSKKKKR

SEQ ID NO: 745 - protein, 39 aa, Artificial Sequence
  chemically synthesized
KKRKRKEEGEKEKKPRKKVPKQLGVMALNSHKSEKKKKR

SEQ ID NO: 746 - protein, 33 aa, Artificial Sequence
  chemically synthesized
KKRKKVSGPNPLSCLKKKKKTQDTNSSASEKKR

SEQ ID NO: 747 - protein, 33 aa, Artificial Sequence; identical to SEQ ID NO: 629
  chemically synthesized

SEQ ID NO: 748 - protein, 40 aa, Artificial Sequence
  chemically synthesized
KKRLEDEQEMVRMVRAATLIQALWKGYLVRSMLKSKKKKR

SEQ ID NO: 749 - protein, 32 aa, Artificial Sequence
  chemically synthesized
KKRSREDVGDNDDTEGAIGVRNKVAGGKMKKR

SEQ ID NO: 750 - protein, 39 aa, Artificial Sequence
  chemically synthesized
KKREEMEEENRKIIEFAKLQQQREEDRMAKVQEKVKKKR

SEQ ID NO: 751 - protein, 31 aa, Artificial Sequence
  chemically synthesized
KKRRQYQEEEVLDGPGVNTAQKAKKKKQKKR

SEQ ID NO: 752 - protein, 37 aa, Artificial Sequence
  chemically synthesized
KKRKQKEEEEPTTTERSAEKYSEHTDESIRKSKKKKR

SEQ ID NO: 753 - protein, 41 aa, Artificial Sequence
  chemically synthesized
KKREGSSAQAPASKKPKEEIPVIPKGKPKSGRVWKDRSKKR

SEQ ID NO: 754 - protein, 26 aa, Artificial Sequence
  chemically synthesized
KKRKLDPEIVPEEKDCGDDEGNSKKR

SEQ ID NO: 755 - protein, 39 aa, Artificial Sequence
  chemically synthesized
KKRMEAEQEMVRMVRAATLIQAFWKGYLVRSLLRSKKKR

SEQ ID NO: 756 - protein, 45 aa, Artificial Sequence
  chemically synthesized
KKRSTSVMSFFSKVSWNLRLQKQEPLKNVFFILAETARDPSVKKR

SEQ ID NO: 757 - protein, 41 aa, Artificial Sequence
  chemically synthesized
KKRHKKEKRKKEKDRGRRLDSSLAPAPIQHDSDSSTCCKKR

SEQ ID NO: 758 - protein, 40 aa, Artificial Sequence
  chemically synthesized
KKRIERFYHCLQHALEKETVSTTSQPKEKVNTSYIRKKKR

SEQ ID NO: 759 - protein, 33 aa, Artificial Sequence; identical to SEQ ID NO: 629
  chemically synthesized

SEQ ID NO: 760 - protein, 27 aa, Artificial Sequence
  chemically synthesized
KKRKERFGIVTSSAGTGTTEDTEAKKR

SEQ ID NO: 761 - protein, 29 aa, Artificial Sequence
  chemically synthesized
KKRKKGEKQIPGEEKGRKRRRVKEDKKKR

SEQ ID NO: 762 - protein, 42 aa, Artificial Sequence
  chemically synthesized
KKRKGSSSLAPASKKLNKEELPVIPKGKPKSGRVWKDRSKKR

SEQ ID NO: 763 - protein, 45 aa, Artificial Sequence; identical to SEQ ID NO: 619
  chemically synthesized

SEQ ID NO: 764 - protein, 35 aa, Artificial Sequence
  chemically synthesized
KKRKDEGKSRTTPPERPLTEVKAETRAEEAPEKKR

SEQ ID NO: 765 - protein, 35 aa, Artificial Sequence
  chemically synthesized
KKRKEEGKSRTTPPERPLTEVKAETRAEEAPEKKR

SEQ ID NO: 766 - protein, 35 aa, Artificial Sequence; identical to SEQ ID NO: 624
  chemically synthesized

SEQ ID NO: 767 - protein, 35 aa, Artificial Sequence; identical to SEQ ID NO: 624
  chemically synthesized

SEQ ID NO: 768 - protein, 35 aa, Artificial Sequence; identical to SEQ ID NO: 651
  chemically synthesized

SEQ ID NO: 769 - protein, 43 aa, Artificial Sequence
  chemically synthesized
KKRKALEAKKEEEEIQREMVKLRREIIERRRTVKEAWKIEKKR

SEQ ID NO: 770 - protein, 41 aa, Artificial Sequence; identical to SEQ ID NO: 625
  chemically synthesized

SEQ ID NO: 771 - protein, 37 aa, Artificial Sequence
  chemically synthesized
KKRILESHNNTLVDPCEEHKKKNPDASVKFSEFLKKR

SEQ ID NO: 772 - protein, 34 aa, Artificial Sequence
  chemically synthesized
KKRLRMLAVLGVELVFMLAVILGVLLGAHTHKKR

SEQ ID NO: 773 - protein, 37 aa, Artificial Sequence
  chemically synthesized
KKRKRGDDDYALPGDGDLVVECEEEGEKGEKRVKKKR

SEQ ID NO: 774 - protein, 40 aa, Artificial Sequence
  chemically synthesized
KKRKKRKRGDDDYALPGDGDLVVECEEEGEKGEKRVKKKR

SEQ ID NO: 775 - protein, 43 aa, Artificial Sequence
  chemically synthesized
KKRKRGDDDYALPGDGDLVVECEEEGEKGEKRVKKKRRSRKKR

SEQ ID NO: 776 - protein, 46 aa, Artificial Sequence
  chemically synthesized
KKRKKRKRGDDDYALPGDGDLVVECEEEGEKGEKRVKKKRRSRKKR

SEQ ID NO: 777 - protein, 37 aa, Artificial Sequence; identical to SEQ ID NO: 773
  chemically synthesized

SEQ ID NO: 778 - protein, 40 aa, Artificial Sequence; identical to SEQ ID NO: 774
  chemically synthesized

SEQ ID NO: 779 - protein, 43 aa, Artificial Sequence; identical to SEQ ID NO: 775
  chemically synthesized

SEQ ID NO: 780 - protein, 46 aa, Artificial Sequence; identical to SEQ ID NO: 776
  chemically synthesized

SEQ ID NO: 781 - protein, 28 aa, Artificial Sequence
  chemically synthesized
KKRNPESALLNQEKNIEENYAESTIKKR

SEQ ID NO: 782 - protein, 28 aa, Artificial Sequence
  chemically synthesized
KKRNPESALSNQEKNIEKNYAESKIKKR

SEQ ID NO: 783 - protein, 45 aa, Artificial Sequence
  chemically synthesized
KKRDKGEKKDFCFLTVWGMETELPFGSAQKKPSFFEPISKELKKR

SEQ ID NO: 784 - protein, 28 aa, Artificial Sequence
  chemically synthesized
KKRNPESALLNQEKNIEENFAESMIKKR

SEQ ID NO: 785 - protein, 31 aa, Artificial Sequence
  chemically synthesized
KKRQDKKNPGSDAQNQKDVEEDSTRSDSKKR

SEQ ID NO: 786 - protein, 28 aa, Artificial Sequence
  chemically synthesized
KKRKKKDEGLDEDDYLLLQDNNVKFKKR

SEQ ID NO: 787 - protein, 27 aa, Artificial Sequence
  chemically synthesized
KKRKSLERYGSITSAVSDDKGDTTKKR

SEQ ID NO: 788 - protein, 39 aa, Artificial Sequence
  chemically synthesized
KKRHYGGESSLAGTQSSIIMRTAAEMLAVYQACGIKKKR

SEQ ID NO: 789 - protein, 36 aa, Artificial Sequence
  chemically synthesized
KKRGRNIDDAEEVENELKRVEDELYKIPDHLKVKKR

SEQ ID NO: 790 - protein, 27 aa, Artificial Sequence
  chemically synthesized
KKREEEAEQARKREEEREKEEEMAKKR

SEQ ID NO: 791 - protein, 32 aa, Artificial Sequence
  chemically synthesized
KKREEEEARKREEERKREEEEAKRREEERKKR

SEQ ID NO: 792 - protein, 44 aa, Artificial Sequence
  chemically synthesized
KKRRGRPRKYGPDSGEMSLGLNPGAPSFTVSQPSSGGDGGEKKR

SEQ ID NO: 793 - protein, 34 aa, Artificial Sequence
  chemically synthesized
KKRQDFVKDRRWIKREYDEFKVRINGLPEQIKKR

SEQ ID NO: 794 - protein, 44 aa, Artificial Sequence
  chemically synthesized
KKRKLETCDETWKREVVQAEEAKGGGEQKSESKKAKKQDKEKKR

SEQ ID NO: 795 - protein, 30 aa, Artificial Sequence
  chemically synthesized
KKRKPREWWKEEFCEELTRKKRKKKKKKKR

SEQ ID NO: 796 - protein, 37 aa, Artificial Sequence
  chemically synthesized
KKRGLSSISSIDSWFHRDDGASSVHDHNLNPTKRKKR

SEQ ID NO: 797 - protein, 45 aa, Artificial Sequence
  chemically synthesized
KKRKKKKKKKRGLSSISSIDSWFHRDDGASSVHDHNLNPTKRKKR

SEQ ID NO: 798 - protein, 27 aa, Artificial Sequence
  chemically synthesized
KKRRRATKKPYSRSIVGATLEVIQKKR

SEQ ID NO: 799 - protein, 37 aa, Artificial Sequence
  chemically synthesized
KKRVDSVVIGRSSKARRGHREPRKARSSGRLEAEKKR

SEQ ID NO: 800 - protein, 45 aa, Artificial Sequence
  chemically synthesized
KKRNKKFTISIKLFKKFYKNKLNENGEYKIESQILQNEKELNKKR

SEQ ID NO: 801 - protein, 39 aa, Artificial Sequence
  chemically synthesized
KKRIYLISDRNPSTGETGWYDKDKGRESKKGIWQIFKKR

SEQ ID NO: 802 - protein, 37 aa, Artificial Sequence
  chemically synthesized
KKRIAKAKSEAAEYQKLLASRLKEQREKRSESLAKKR

SEQ ID NO: 803 - protein, 27 aa, Artificial Sequence
  chemically synthesized
KKRRRTTKKPYSRSIVGATLEVIQKKR

SEQ ID NO: 804 - protein, 45 aa, Artificial Sequence
  chemically synthesized
KKRRAKVFKLAKGFKGAHNSLFRTAKQQVLKALRYSYVGRKRKKR

SEQ ID NO: 805 - protein, 37 aa, Artificial Sequence
  chemically synthesized
KKRIAKANSDAADYQKLLASRLKEQRDRRSESLAKKR

SEQ ID NO: 806 - protein, 29 aa, Artificial Sequence
  chemically synthesized
KKRFLDEMNKKKSCLKMVAQFFFQFKKKR

SEQ ID NO: 807 - protein, 43 aa, Artificial Sequence
  chemically synthesized
KKRTNLKKGPQSKLTKKKKERKVDKTRAIINEIERVLKEKKKR

SEQ ID NO: 808 - protein, 46 aa, Artificial Sequence
  chemically synthesized
KKRFLDEMNKKKSCLKMVAQFFFQFKKKRKNKKIDKAIKGINKKKR

SEQ ID NO: 809 - protein, 32 aa, Artificial Sequence
  chemically synthesized
KKRNKMQDLTNRANKARNEIERIRKEKKKKKR

SEQ ID NO: 810 - protein, 34 aa, Artificial Sequence
  chemically synthesized
KKRASVRKICQKCRLTRRRGRIRVICSNPRHKKR

SEQ ID NO: 811 - protein, 29 aa, Artificial Sequence
  chemically synthesized
KKRRTLQEWQIQPKKYLLEKHNIKVLKKR

SEQ ID NO: 812 - protein, 45 aa, Artificial Sequence
  chemically synthesized
KKRRAKIFKLAKGFKGAHKCLFRTAKQQVLKALRYSYVGRKRKKR

SEQ ID NO: 813 - protein, 46 aa, Artificial Sequence
  chemically synthesized
KKRLTAAQVLEHTWILNAKKAPNVSLGETVKARLKQFSVMNKLKKR

SEQ ID NO: 814 - protein, 29 aa, Artificial Sequence
  chemically synthesized
KKRLTLKHRIEIVMGIICMIVAGFQEKKR

SEQ ID NO: 815 - protein, 28 aa, Artificial Sequence
  chemically synthesized
KKRIDNFKKEALLKANPQIQANPQLKKR

SEQ ID NO: 816 - protein, 46 aa, Artificial Sequence
  chemically synthesized
KKRLSAAQVLEHSWIQNAKKAPNVSLGETVKARLKQFSVMNKLKKR

SEQ ID NO: 817 - protein, 28 aa, Artificial Sequence
  chemically synthesized
KKRRGRPRKYEANGAPLPSSSVPLVKKR

SEQ ID NO: 818 - protein, 36 aa, Artificial Sequence
  chemically synthesized
KKRGYNGKVIALIVALSTVISIMLVLLFLFMMYKKR

SEQ ID NO: 819 - protein, 27 aa, Artificial Sequence
  chemically synthesized
KKRDASFVQPDERTAQTFSTKNKEKKR

SEQ ID NO: 820 - protein, 33 aa, Artificial Sequence
  chemically synthesized
KKRKLEAEAEVVVVEAAAATSTDEATKSSKKKR

SEQ ID NO: 821 - protein, 46 aa, Artificial Sequence
  chemically synthesized
KKRSRATSTDKNKRARVNKRAQKNVEMSGDNNEGEEEEGETKLKKR

SEQ ID NO: 822 - protein, 27 aa, Artificial Sequence
  chemically synthesized
KKRVSDESDSDSDSGDRKRRRRSMKKR

SEQ ID NO: 823 - protein, 45 aa, Artificial Sequence
  chemically synthesized
KKRKRSKPLRPAPSRVLRSTSEKKNKAHNELLNDGAGVQPAEKKR

SEQ ID NO: 824 - protein, 26 aa, Artificial Sequence
  chemically synthesized
KKRKRSSKKDKHRRSKQRDKRHEKKR

SEQ ID NO: 825 - protein, 44 aa, Artificial Sequence
  chemically synthesized
KKRSMRDKRPKRKSRRSPDSLEDSNSGSEASLSDVNVEIGAKKR

SEQ ID NO: 826 - protein, 41 aa, Artificial Sequence
  chemically synthesized
KKRKSKKNKRHKKHSSRTVEETDESSTGSEDSREKRGSKKR

SEQ ID NO: 827 - protein, 40 aa, Artificial Sequence
  chemically synthesized
KKREEQLEKARLAMERKRKLHEKAAAKAVIRVKKEAEKKR

SEQ ID NO: 828 - protein, 34 aa, Artificial Sequence
  chemically synthesized
KKRLRMLAVLGVELVFMLAVILGVLLSAHTHKKR

SEQ ID NO: 829 - protein, 44 aa, Artificial Sequence
  chemically synthesized
KKRKGSETEGWENLPDDLSCSTASRSSNFRSHFSLEGYARLKKR

SEQ ID NO: 830 - protein, 41 aa, Artificial Sequence
  chemically synthesized
KKRVYKDKSRCYECGDEGHLSYECPKNQLGPRERPPPPKKR

SEQ ID NO: 831 - protein, 29 aa, Artificial Sequence
  chemically synthesized
KKRMEALNLPKLSQILNSTSVKISPMKKR

SEQ ID NO: 832 - protein, 30 aa, Artificial Sequence
  chemically synthesized
KKRSIPRTPEKKMVDVKRVHIQRRGVGKKR

SEQ ID NO: 833 - protein, 26 aa, Artificial Sequence
  chemically synthesized
KKRVKTQCVIKSSDKSDHDTLLKKKR

SEQ ID NO: 834 - protein, 27 aa, Artificial Sequence
  chemically synthesized
KKRVYRLVKASDVKSKEHVKNKSGKKR

SEQ ID NO: 835 - protein, 27 aa, Artificial Sequence
  chemically synthesized
KKRPGVSPGDRSGGKGRPTSRMGNKKR

SEQ ID NO: 836 - protein, 36 aa, Artificial Sequence
  chemically synthesized
KKRNTCSVSSQTRKVSLKISKINGVGVRCTPNSKKR

SEQ ID NO: 837 - protein, 37 aa, Artificial Sequence
  chemically synthesized
KKRQDKLEMSEIKQFFDRPIMKAAKELNVGLTVLKKR

SEQ ID NO: 838 - protein, 43 aa, Artificial Sequence
  chemically synthesized
KKRNLKKKRQDKLEMSEIKQFFDRPIMKAAKELNVGLTVLKKR

SEQ ID NO: 839 - protein, 29 aa, Artificial Sequence
  chemically synthesized
KKRKLYDAMKISQSRKRSGVEIIEQRKKR

SEQ ID NO: 840 - protein, 36 aa, Artificial Sequence
  chemically synthesized
KKRGYNSQVLALIVALSGVTVILLALLFFFVMYKKR

SEQ ID NO: 841 - protein, 39 aa, Artificial Sequence
  chemically synthesized
KKRQPEFRMLGKDHLSDQESVEVRVPDSIKKPIDSSKKR

SEQ ID NO: 842 - protein, 37 aa, Artificial Sequence
  chemically synthesized
KKRVAKAKSEAAEYQKLLASRLKEQRDRRSESLAKKR

SEQ ID NO: 843 - protein, 29 aa, Artificial Sequence
  chemically synthesized
KKRKEETVLLPSGVQGLGMGLPDMRSKKR

SEQ ID NO: 844 - protein, 39 aa, Artificial Sequence
  chemically synthesized
KKRVKKLKSKKLEAEEELNNVQEIDAHDIVMEQKSDKKR

SEQ ID NO: 845 - protein, 38 aa, Artificial Sequence
  chemically synthesized
KKRKKTPNGDPQRLGIDTLLPQCLRGAPAAARRKRKKR

SEQ ID NO: 846 - protein, 36 aa, Artificial Sequence
  chemically synthesized
KKRRAPPPPSPGLLGQDKVSEKASLSSQADLQKKKR

SEQ ID NO: 847 - protein, 39 aa, Artificial Sequence; identical to SEQ ID NO: 643
  chemically synthesized

SEQ ID NO: 848 - protein, 42 aa, Artificial Sequence
  chemically synthesized
KKRMRLEEENEGLRQRLIETELAKQVLQTELDRPREHSLKKR

SEQ ID NO: 849 - protein, 33 aa, Artificial Sequence
  chemically synthesized
KKRAKMGKLKDKFKTELESTSEILGFDVKTKKR

SEQ ID NO: 850 - protein, 45 aa, Artificial Sequence
  chemically synthesized
KKRKKLKSEGTTSEKKAASQQDAVTEGAMPAATGKDQPPSTGKKR

SEQ ID NO: 851 - protein, 33 aa, Artificial Sequence
  chemically synthesized
KKRKEEERKKKETDQKKEAAVSVQEESDLEKKR

SEQ ID NO: 852 - protein, 29 aa, Artificial Sequence
  chemically synthesized
KKRKKGEKQAPGEEKGRKRRRVKEDKKKR

SEQ ID NO: 853 - protein, 36 aa, Artificial Sequence
  chemically synthesized
KKRSFSGFGSPLDRLSAGSVEHRGKQRKAVDHSKKR

SEQ ID NO: 854 - protein, 36 aa, Artificial Sequence
  chemically synthesized
KKRSFSGFGSPLDRLSAGSVEHRGKQRRVVDHSKKR

SEQ ID NO: 855 - protein, 27 aa, Artificial Sequence
  chemically synthesized
KKRVGDSSALQTIHGKEMSKIARKKKR

SEQ ID NO: 856 - protein, 27 aa, Artificial Sequence
  chemically synthesized
KKRVGDSSALQTIHGKEMSKIARKKKR

SEQ ID NO: 857 - protein, 41 aa, Artificial Sequence; identical to SEQ ID NO: 625
  chemically synthesized

SEQ ID NO: 858 - protein, 39 aa, Artificial Sequence
  chemically synthesized
KKRDKVEASSLPEARAGKRERCSAEDEDCLPPRPKAKKR

SEQ ID NO: 859 - protein, 45 aa, Artificial Sequence
  chemically synthesized
KKRRKKSSGERLKEEKPKKSKTAAASKTKGKSKLNTITPVVGKKR

SEQ ID NO: 860 - protein, 39 aa, Artificial Sequence
  chemically synthesized
KKRKQKEGEEAATTEKSLGDELLGHTDRSFRDSRKKKKR

SEQ ID NO: 861 - protein, 44 aa, Artificial Sequence
  chemically synthesized
KKRQKAERQGTAIGSEEEEAAGESGPRELSTEQSDQPSRKKKKR

SEQ ID NO: 862 - protein, 46 aa, Artificial Sequence
  chemically synthesized
KKRRKQRHEEDGEMGVCDEGGRDVTSRPKAVNSGGDKDPRRSSKKR

SEQ ID NO: 863 - protein, 33 aa, Artificial Sequence
  chemically synthesized
KKRTKMGKLKDKFKTELESTSEIIGFDVKTKKR

SEQ ID NO: 864 - protein, 45 aa, Artificial Sequence
  chemically synthesized
KKREQTASAPATPLVSKHRPSFTRSNTISKPYISNTLPSDAPKKR

SEQ ID NO: 865 - protein, 27 aa, Artificial Sequence
  chemically synthesized
KKRKERFGIVTSSAGTGTTEDTEAKKR

SEQ ID NO: 866 - protein, 42 aa, Artificial Sequence
  chemically synthesized
KKRPKGYVQTRTGRTSLKNSSETVGQKRKKAEETKGLPPKKR

SEQ ID NO: 867 - protein, 33 aa, Artificial Sequence
  chemically synthesized
KKRQRLIDVQDELIRLEPQLKQLQTKYDDLKKR

SEQ ID NO: 868 - protein, 45 aa, Artificial Sequence
  chemically synthesized
KKRKMYEDKPLSSESLSESDCGEVQAKKKKSGEERERTTDKAKKR

SEQ ID NO: 869 - protein, 31 aa, Artificial Sequence
  chemically synthesized
KKRVKQFKNKPQGGKGPKDKFQKANKFNKKR

SEQ ID NO: 870 - protein, 36 aa, Artificial Sequence
  chemically synthesized
KKRQTCEEDLDTQDEEDKDDLTKKERKVRKKDKKKR

SEQ ID NO: 871 - protein, 44 aa, Artificial Sequence
  chemically synthesized
KKRQQYCEEVLDVSNKDDGRTWEAEDGGERSQPHPKARAKKKKR

SEQ ID NO: 872 - protein, 46 aa, Artificial Sequence
  chemically synthesized
KKRRRRHHEEEEEMGVCDEGGRDVTGGPKAVNSGADTDPWRSSKKR

SEQ ID NO: 873 - protein, 46 aa, Artificial Sequence
  chemically synthesized
KKRSSIWQFFSRLFSSSSNATKKPEPPVNLKYNAPTSHVTPSVKKR

SEQ ID NO: 874 - protein, 36 aa, Artificial Sequence
  chemically synthesized
KKRRAPPPPSPKLLGQDKVSEKASLSSQADLQKKKR

SEQ ID NO: 875 - protein, 32 aa, Artificial Sequence
  chemically synthesized
KKRKALEFVTNPDIAAKKKLKKHKNKSEAKKR

SEQ ID NO: 876 - protein, 39 aa, Artificial Sequence
  chemically synthesized
KKRDKVETGGLPESKAGKRERSSAEDEDCLPPRPKLKKR

SEQ ID NO: 877 - protein, 41 aa, Artificial Sequence
  chemically synthesized
KKRVIASPQAPASKKLKEELPVIPKGKPKSGRVWKDRSKKR

SEQ ID NO: 878 - protein, 40 aa, Artificial Sequence
  chemically synthesized
KKRVEAEREMVRMVRAATLIQAMWKGYLVRSMLRSRKKKR

SEQ ID NO: 879 - protein, 27 aa, Artificial Sequence
  chemically synthesized
KKRSLKLTEGKSLVDGNGEKPVMKKKR

SEQ ID NO: 880 - protein, 28 aa, Artificial Sequence
  chemically synthesized
KKRRRRPPKGEEGSEEEETENGPKPKKR

SEQ ID NO: 881 - protein, 37 aa, Artificial Sequence
  chemically synthesized
KKRGGGGGRRSKKGGEFDEFVNDDTDDDLPVSKKKKR

SEQ ID NO: 882 - protein, 28 aa, Artificial Sequence
  chemically synthesized
KKRRREPQTPAQETLESEWPQKAKKKKR

SEQ ID NO: 883 - protein, 33 aa, Artificial Sequence; identical to SEQ ID NO: 851
  chemically synthesized

SEQ ID NO: 884 - protein, 36 aa, Artificial Sequence
  chemically synthesized
KKRSAGIIEDVGGEVQNMLEKFGADINKALLAKKKR

SEQ ID NO: 885 - protein, 45 aa, Artificial Sequence; identical to SEQ ID NO: 618
  chemically synthesized

SEQ ID NO: 886 - protein, 31 aa, Artificial Sequence
  chemically synthesized
KKRAATTVLQELKKLPPLPVIEKPKLFFKKR

SEQ ID NO: 887 - protein, 29 aa, Artificial Sequence
  chemically synthesized
KKRKKGQEAGHEAGGEDAAEANGAPEKKR

SEQ ID NO: 888 - protein, 45 aa, Artificial Sequence; identical to SEQ ID NO: 618
  chemically synthesized

SEQ ID NO: 889 - protein, 34 aa, Artificial Sequence
  chemically synthesized
KKRKRYFMQEEMEAKTMEPVAELPVPSATSSKKR

SEQ ID NO: 890 - protein, 37 aa, Artificial Sequence
  chemically synthesized
KKRKKSKGTETSQVEHTEPVAQTEPPEGTFLFPTKKR

SEQ ID NO: 891 - protein, 43 aa, Artificial Sequence
  chemically synthesized
KKRKRQKEADGTEEVDGIVADSQPQVIVEAQEETILLSPTKKR

SEQ ID NO: 892 - protein, 31 aa, Artificial Sequence
  chemically synthesized
KKRHQEDQDPIFQASDSSGYQSDHNKKKKKR

SEQ ID NO: 893 - protein, 45 aa, Artificial Sequence
  chemically synthesized
KKRHQEDQDPIFQASDSSGYQSDHNKKKKKRKHSEEANFESPKKR

SEQ ID NO: 894 - protein, 45 aa, Artificial Sequence
  chemically synthesized
KKRRTPLLSFLSKVSWKLRLQKRELLKNALFVLAERARDPNAKKR

SEQ ID NO: 895 - protein, 46 aa, Artificial Sequence
  chemically synthesized
KKRKKLKSEGTTPEKNAASQQDAVTEGAMPAATGKDQPPSTGKKKR

SEQ ID NO: 896 - protein, 39 aa, Artificial Sequence; identical to SEQ ID NO: 643
  chemically synthesized

SEQ ID NO: 897 - protein, 26 aa, Artificial Sequence
  chemically synthesized
KKRLRNKRSRSRESSSRPRARKDKKR

SEQ ID NO: 898 - protein, 31 aa, Artificial Sequence
  chemically synthesized
KKRREKAIGEGRVVYIRNLSGDMSSRELKKR

SEQ ID NO: 899 - protein, 35 aa, Artificial Sequence
  chemically synthesized
KKRRRSPSYSPSPVKKKKKKSSKKHKRHRSFSKKR

SEQ ID NO: 900 - protein, 31 aa, Artificial Sequence; identical to SEQ ID NO: 661
  chemically synthesized

SEQ ID NO: 901 - protein, 31 aa, Artificial Sequence
  chemically synthesized
KKRGRTPKILIPHPTSTPSKSAEPLKFPKKR

SEQ ID NO: 902 - protein, 46 aa, Artificial Sequence
  chemically synthesized
KKRLDGIEEVEREINRGRSCKGSEFTCPEDNKIRELTLEIERLKKR

SEQ ID NO: 903 - protein, 38 aa, Artificial Sequence
  chemically synthesized
KKRFGGVQELLSQQKKSGEVAVLKRDGRYIYYLITKKR

SEQ ID NO: 904 - protein, 37 aa, Artificial Sequence
  chemically synthesized
KKRLRRMTPFWRGVSLRPIGASCRDDSECITRLCKKR

SEQ ID NO: 905 - protein, 46 aa, Artificial Sequence
  chemically synthesized
KKRLDGIEEVEREINRGRLCKGSEFTCPEDNKIRELTLEIERLKKR

SEQ ID NO: 906 - protein, 45 aa, Artificial Sequence
  chemically synthesized
KKRKMYEDKPLSSESLSESDCGEVQAKRKKSGEERERTTDKAKKR

SEQ ID NO: 907 - protein, 32 aa, Artificial Sequence
  chemically synthesized
KKRKREDAGDDDDKEGAIGVRNKVAGGKMKKR

SEQ ID NO: 908 - protein, 45 aa, Artificial Sequence
  chemically synthesized
KKRDRAELQPGGPSEDECSDASVEAAEDCVQTPDIQDDVPKPKKR

SEQ ID NO: 909 - protein, 27 aa, Artificial Sequence
  chemically synthesized
KKRKERFGIVTSSAGTGTTEDTEAKKR

SEQ ID NO: 910 - protein, 40 aa, Artificial Sequence
  chemically synthesized
KKRVEAEREMVRMVRAATLIQAVWKGYLVRSILRSKKKKR

SEQ ID NO: 911 - protein, 35 aa, Artificial Sequence
  chemically synthesized
KKRKLKADDTDNVYYNANRKNSKRLNVEVFIPKKR

SEQ ID NO: 912 - protein, 45 aa, Artificial Sequence; identical to SEQ ID NO: 859
  chemically synthesized

SEQ ID NO: 913 - protein, 39 aa, Artificial Sequence
  chemically synthesized
KKRKNISQDTFGTTFGRIHMQKQDLSKLQTRKMKGLKKR

SEQ ID NO: 914 - protein, 43 aa, Artificial Sequence
  chemically synthesized
KKRVIASPQAPASKKLKEKEELPVIPKGKPKSGRVWKDRSKKR

SEQ ID NO: 915 - protein, 37 aa, Artificial Sequence
  chemically synthesized
KKRQRSESHSASERSSSAESERSYKKSKKHKKKSKKR

SEQ ID NO: 916 - protein, 32 aa, Artificial Sequence
  chemically synthesized
KKRQLLDSDEEEDDEGRRQAVSGTPRVHRKKR

SEQ ID NO: 917 - protein, 39 aa, Artificial Sequence; identical to SEQ ID NO: 667
  chemically synthesized

SEQ ID NO: 918 - protein, 32 aa, Artificial Sequence
  chemically synthesized
KKREAAEKEKRARIAKERAEKERLERQQEKKR

SEQ ID NO: 919 - protein, 41 aa, Artificial Sequence
  chemically synthesized
KKRGRKPGSVVAAAAAEAKKKAVKESSIRSVHETVLPIKKR

SEQ ID NO: 920 - protein, 46 aa, Artificial Sequence
  chemically synthesized
KKRKRCGVCVPCLRKEPCGACYNCVNRSTSHQICKMRKCEQLKKKR

SEQ ID NO: 921 - protein, 46 aa, Artificial Sequence; identical to SEQ ID NO: 920
  chemically synthesized

SEQ ID NO: 922 - protein, 31 aa, Artificial Sequence
  chemically synthesized
KKRKRSSTRKASDETDSESETDSRESFKKKR

SEQ ID NO: 923 - protein, 34 aa, Artificial Sequence
  chemically synthesized
KKRKKKHPSKKERKGTIRDYECAETKQKKKHKKR

SEQ ID NO: 924 - protein, 26 aa, Artificial Sequence
  chemically synthesized
KKRRREHGQLWFPEGFIPKEPSKKKR

SEQ ID NO: 925 - protein, 32 aa, Artificial Sequence
  chemically synthesized
KKRMAAELYPVSDHATLQKSGAVMLSLPEKKR

SEQ ID NO: 926 - protein, 36 aa, Artificial Sequence
  chemically synthesized
KKRRAPAPPPAPTQTLPPTSQISLGSPSSHNLLKKR

SEQ ID NO: 927 - protein, 31 aa, Artificial Sequence
  chemically synthesized
KKRKHVKNEEDETNHEKTKQHLKEEKRRKKR

SEQ ID NO: 928 - protein, 46 aa, Artificial Sequence
  chemically synthesized
KKRSSLFSPRKSRKNGNAAAESGRETGKHKSLWKTVFSVYKKDKKR

SEQ ID NO: 929 - protein, 46 aa, Artificial Sequence
  chemically synthesized
KKRKRCGVCVPCLRKEPCGTCYNCVNRSTSHQICKMRKCEQLKKKR

SEQ ID NO: 930 - protein, 27 aa, Artificial Sequence
  chemically synthesized
KKRGLKPSGKRELAHPPSSEPPLPKKR

SEQ ID NO: 931 - protein, 33 aa, Artificial Sequence
  chemically synthesized
KKRKRHRSASRKGRHSGSSSRRKRKEDKKHKKR

SEQ ID NO: 932 - protein, 35 aa, Artificial Sequence
  chemically synthesized
KKRREERRKILEEEEQKKKQEEAERKIREEEEKKR

SEQ ID NO: 933 - protein, 35 aa, Artificial Sequence; identical to SEQ ID NO: 932
  chemically synthesized

SEQ ID NO: 934 - protein, 26 aa, Artificial Sequence
  chemically synthesized
KKRRREHGQLWFPDGFIPKEPSKKKR

SEQ ID NO: 935 - protein, 27 aa, Artificial Sequence
  chemically synthesized
KKRRRRDEDSDTEGEQQTQPDGEAKKR

SEQ ID NO: 936 - protein, 31 aa, Artificial Sequence
  chemically synthesized
KKRRRRDEDSDTEGEQQTQPDGEAKKRRKKR

SEQ ID NO: 937 - protein, 34 aa, Artificial Sequence
  chemically synthesized
KKRECAANGVDYERAKLLEISAEDAERWERKKKR

SEQ ID NO: 938 - protein, 39 aa, Artificial Sequence
  chemically synthesized
KKRDEERKRELEERRKKEQEEQLRRLREEEREEDEKKKR

SEQ ID NO: 939 - protein, 41 aa, Artificial Sequence
  chemically synthesized
KKRSSSRCRSGSDSPARKHSTLAKYRAEVPDRRKKERRKKR

SEQ ID NO: 940 - protein, 26 aa, Artificial Sequence
  chemically synthesized
KKRRKRPQKAAGSDDDEEQTPQSKKR

SEQ ID NO: 941 - protein, 30 aa, Artificial Sequence
  chemically synthesized
KKRKKGGSSSGEQGEGGDEGEGGEKKKKKR

SEQ ID NO: 942 - protein, 26 aa, Artificial Sequence
  chemically synthesized
KKRSYKDLLREEEEIAEQVRKSSKKR

SEQ ID NO: 943 - protein, 45 aa, Artificial Sequence
  chemically synthesized
KKRKVEKQIPDATKKKKATVKKECFITQERSEEKPDNESNKNKKR

SEQ ID NO: 944 - protein, 27 aa, Artificial Sequence
  chemically synthesized
KKRHDSPDLSPQEQQTTPDLSLQRKKR

SEQ ID NO: 945 - protein, 30 aa, Artificial Sequence
  chemically synthesized
KKRKFEKPPDPSVRKRLKLVKEEKLLRKKR

SEQ ID NO: 946 - protein, 27 aa, Artificial Sequence
  chemically synthesized
KKRRKRPQKGGDGSDDDEDQAPQPKKR

SEQ ID NO: 947 - protein, 32 aa, Artificial Sequence
  chemically synthesized
KKRRKRPQKGGDGSDDDEDQAPQPKKRQPKKR

SEQ ID NO: 948 - protein, 33 aa, Artificial Sequence
  chemically synthesized
KKRKKGGGSSGSGGEQGEGGEEGEGGEKKKKKR

SEQ ID NO: 949 - protein, 34 aa, Artificial Sequence
  chemically synthesized
KKRPEVLTIHENSRQENYETETVQVKQAKPNKKR

SEQ ID NO: 950 - protein, 39 aa, Artificial Sequence
  chemically synthesized
KKRKHKLQETKGKIKKSESVQNTDPTEEADSSVKKKKKR

SEQ ID NO: 951 - protein, 44 aa, Artificial Sequence
  chemically synthesized
KKRKNRKKPTILEGKETETPVEKTPEGASGEGKKNKNKKKNKKR

SEQ ID NO: 952 - protein, 39 aa, Artificial Sequence
  chemically synthesized
KKRKKNFMMMRHSQNVRTKGKRSFREKQIALRDSLLKKR

SEQ ID NO: 953 - protein, 31 aa, Artificial Sequence
  chemically synthesized
KKRRARSRSNSRSKHRHRSRSRSKSREKKKR

SEQ ID NO: 954 - protein, 42 aa, Artificial Sequence
  chemically synthesized
KKRRKTCKTSTTDSRSSRLEEDPVGQDIPDESNAQSSPKKKR

SEQ ID NO: 955 - protein, 39 aa, Artificial Sequence
  chemically synthesized
KKRDEERRRELEERRKKEQEEQLRRLREEEREEEERKKR

SEQ ID NO: 956 - protein, 26 aa, Artificial Sequence
  chemically synthesized
KKRSYKDLLREEEEIAEQVRKSSKKR

SEQ ID NO: 957 - protein, 34 aa, Artificial Sequence
  chemically synthesized
KKREREQSETASTAPVEPFTLPKPVEVVVEEKKR

SEQ ID NO: 958 - protein, 31 aa, Artificial Sequence
  chemically synthesized
KKRAALSILQELKKLPVLPVVEKPKVHYKKR

SEQ ID NO: 959 - protein, 26 aa, Artificial Sequence
  chemically synthesized
KKRRRREGESDTEEEQTQPDGEGKKR

SEQ ID NO: 960 - protein, 30 aa, Artificial Sequence
  chemically synthesized
KKRRRREGESDTEEEQTQPDGEGKKRRKKR

SEQ ID NO: 961 - protein, 31 aa, Artificial Sequence
  chemically synthesized
KKRRPRSRSRSRSKHRHRSKSRSKSREKKKR

SEQ ID NO: 962 - protein, 34 aa, Artificial Sequence
  chemically synthesized
KKRECAANGVDFERAKLLEISAEDAERWERKKKR

SEQ ID NO: 963 - protein, 46 aa, Artificial Sequence
  chemically synthesized
KKRKELDDVSEDVETLEMVFESRDLDWEEQTANGDQEAQSNKRKKR

SEQ ID NO: 964 - protein, 30 aa, Artificial Sequence
  chemically synthesized
KKRAQRILIFLLEFLLDFCTGEDSVDGKKR

SEQ ID NO: 965 - protein, 41 aa, Artificial Sequence
  chemically synthesized
KKRAPKLRATCSSSGLDNLYNAVANIAKASSLRVEVIHKKR

SEQ ID NO: 966 - protein, 41 aa, Artificial Sequence; identical to SEQ ID NO: 965
  chemically synthesized

SEQ ID NO: 967 - protein, 45 aa, Artificial Sequence
  chemically synthesized
KKRRYFMDIWMKDSSGQEFFIEIKPKKETQPPVKPAHLTTAAKKR

SEQ ID NO: 968 - protein, 35 aa, Artificial Sequence
  chemically synthesized
KKREILIRSLQMIKRQAVKSAANQRNPMGGSWKKR

SEQ ID NO: 969 - protein, 37 aa, Artificial Sequence
  chemically synthesized
KKRPCKVKRKLFGSENIRPNKKIPLASDVDNELEKKR

SEQ ID NO: 970 - protein, 26 aa, Artificial Sequence
  chemically synthesized
KKRMDDTEKRKLQEDRRNEKQDLKKR

SEQ ID NO: 971 - protein, 28 aa, Artificial Sequence
  chemically synthesized
KKRYRSPSSDRSLSRDRSSSRDRSYKKR

SEQ ID NO: 972 - protein, 41 aa, Artificial Sequence
  chemically synthesized
KKRRPGRGDTSATSDGGTSPKRPLRDSWNLLPQRRAAHKKR

SEQ ID NO: 973 - protein, 26 aa, Artificial Sequence
  chemically synthesized
KKRVVGLESCSNVLKTRLMRFALKKR
